(19) United States
(12) Patent Application Publication
(10) Pub. No.: US 2017/0114099 A1
(43) Pub. Date: Apr. 27, 2017

(54) NEW POLYPEPTIDE

(71) Applicant: Affibody AB, Solna (SE)

(72) Inventors: Fredrik Frejd, Stockholm (SE); Elin Gunneriusson, Saltsjöbaden (SE); Ingmarie Höidén-Guthenberg, Kista (SE); Per-Ake Nygren, Ekerö (SE); Susanne Klint, Stockholm (SE); Feifan Yu, Sollentuna (SE)

(21) Appl. No.: 15/317,188

(22) PCT Filed: Jun. 15, 2015
(86) PCT No.: PCT/EP2015/063362

§ 371 Date: Dec. 8, 2016

(30) Foreign Application Priority Data
Jun. 13, 2014 (EP) 14172331.2

(51) Int. Cl. C07K 14/00; G01N 33/68

(52) U.S. Cl. CPC C07K 14/00; G01N 33/6869; G01N 2333/5412; A61K 38/00

(57) ABSTRACT

The present disclosure relates to a class of engineered polypeptides having a binding affinity for interleukin-6, and provides an IL-6 binding polypeptide comprising the sequence EEX₃X₄AWX₇EIH X₁₁ LPNLX₁₆X₁₇X₁₈QX₂₀ X₂₁AFIX₂₅X₂₆LX₂₈X₂₉. The present disclosure also relates to the use of such an IL-6 binding polypeptide as a therapeutic, prognostic and/or diagnostic agent.

### FIELD OF THE INVENTION

[0001] The present disclosure relates to a class of engineered polypeptides having a binding affinity for interleukin-6 (in the following referred to as IL-6). The present disclosure also relates to the use of such an IL-6 binding polypeptide as a therapeutic, prognostic and/or diagnostic agent.

### BACKGROUND

[0002] Inflammation is a cytokine-driven response by the innate immune system to destroy for example pathogens and damaged cells. In some disease conditions, such as rheumatoid arthritis (RA) and Crohn's disease, the regulation of the inflammatory system is impaired leading to tissue damages. Among the most studied inducers of inflammation are the cytokines interleukin-6 (IL-6) and tumor necrosis factor (TNF). IL-6 is also known as B cell Stimulatory Factor 2 (BSF2), Hepatocyte Stimulating Factor (HSF), Hybridoma Growth Factor (HGF) and interferon-beta 2 (IFNB2).

[0003] Human IL-6 consists of a single polypeptide chain of 184 amino acids with a molecular weight of 21 kDa, however a variable glycosylation pattern accounts for sizes varying between 21-26 kDa. IL-6 is secreted by a wide variety of cell types including T cells, B cells, monocytes, fibroblasts, hepatocytes, endothelial cells and keratinocytes. Downstream signaling induces the transition from acute inflammation to either acquired immunity or chronic inflammatory disease. IL-6 signaling and its regulation is complex and involves a number of factors and mechanisms. IL-6 signaling may occur via the classical IL-6 singling pathway, also known as the cis-signaling pathway, or via the trans-signaling pathway. In the classical IL-6 signaling pathway, circulating IL-6 binds to a membrane bound IL-6 receptor α (IL-6Rα) followed by recruitment of the membrane anchored gp130 co-receptor, which results in the formation of a ternary complex. This complex subsequently dimerizes with a second adjacent ternary complex leading to signal transduction via the gp130 moities (Boulanger et al., 2003, Science 300 (5628): 2101-2104). In circulation, IL-6 can also exist as bound to soluble ectodomains of IL-6Ra. Such complexes are responsible for the trans-signaling mechanism, involving IL-6 dependent activation of any cells that express the co-receptor gp130 but lack IL-6Rα (Chalaris et al., 2011, Eur J Cell Biol 90 (6-7): 484-494; Assier et al., 2010, Joint Bone Spine 77 (6):532-6). The trans-signaling, or pro-inflammatory, pathway has been suggested to be the pathway most related to disease conditions, and thus the most preferable to block. In contrast, the classical signaling pathway is regarded as being responsible for important anti-inflammatory and regenerative processes (Scheller et al., 2011, Biochim Biophys Acta 1813 (5): 878-888).

[0004] The anti-IL-6Rα antibody tocilizumab (Actemra®), has been approved for clinical use for IL-6 related disorders. Other drug candidates are also being developed in order to address different IL-6 triggered pathways. These include the antibodies CNTO136 (sirukumab) (Xu et al., 2011, Br J Clin Pharmacol 72 (2): 270-281; Zhuang et al., 2013, Int J Clin Pharmacol Ther 51 (3): 187-199) and MEDI5117 (Finch et al., 2011, J Mol Biol 411 (4): 791-807), which bind to the IL-6 cytokine itself. Additionally the gp130-Fc fusion CR5/18, aimed at selectively blocking the trans-signaling pathway, is under development (Kopf et al., 2010, Nat Rev Drug Discov 9 (9): 703-718; Chalaris et al., 2012, Dig Dis 30 (5): 492-499).

[0005] The unpredictable and chronic nature of inflammatory diseases, as well as a high unmet medical need, warrants the development of new modes of treatment. Since tissue penetration rate is negatively associated with the size of the molecule, a relatively large antibody molecule inherently has poor tissue distribution and penetration capacity.

[0006] Thus, the use of monoclonal antibodies is not always optimal for therapy and there is continued need for provision of agents with a high affinity for IL-6. Of great interest is also the provision of uses of such molecules in the treatment, diagnosis and prognosis of IL-6 related disorders.

### SUMMARY OF THE INVENTION

[0007] It is an object of the present disclosure to provide new IL-6 binding agents, which could for example be used for therapeutic, prognostic and diagnostic applications.

[0008] It is an object of the present disclosure to provide a molecule allowing for efficient therapy targeting various forms of inflammatory and autoimmune diseases while alleviating the abovementioned and other drawbacks of current therapies.

[0009] It is furthermore an object of the present disclosure to provide a molecule suitable for prognostic and diagnostic applications.

[0010] These and other objects, which are evident to the skilled person from the present disclosure, are met by different aspects of the invention as claimed in the appended claims and as generally disclosed herein.

[0011] Thus, in the first aspect of the disclosure, there is provided an IL-6 binding polypeptide, comprising an IL-6 binding motif BM, which motif consists of an amino acid sequence selected from:

i)

EEX₃X₄AWX₇EIHX₁₁LPNLX₁₆X₁₇X₁₈QX₂₀X₂₁AFIX₂₅X₂₆LX₂₈X₂₉

wherein, independently from each other,

[0012] X₃ is selected from A, F, H, K, Q, R, S, W and Y;

[0013] X₄ is selected from A, D, E, F, H, I, K, L, M, N, Q, R, S, T, V and Y;

[0014] X₇ is selected from F, H, I, K, L, M, N, R, S, T, V, W and Y;

[0015] X₁₁ is selected from A, I, K, L, M, N, R, S, T and V;

[0016] X₁₆ is selected from N and T;

[0017] X₁₇ is selected from A, I, T and V;

[0018] X₁₈ is selected from D, E, G, H, K, N, Q, R, S and T;

[0019] X₂₀ is selected from I, L, M, R, T and V;

[0020] X₂₁ is selected from A, S, T and V;

[0021] X₂₅ is selected from I, M, Q, S, T, V and W;

[0022] X₂₆ is selected from K and S;

[0023] X₂₈ is selected from F, L, M and Y; and

[0024] X₂₉ is selected from D and R; and

ii) an amino acid sequence which has at least 93% identity to the sequence defined in i).

[0025] The above definition of a class of sequence related, IL-6 binding polypeptides is based on a statistical analysis of a number of random polypeptide variants of a parent scaffold, that were selected for their interaction with IL-6 in several different selection experiments. The identified IL-6 binding motif, or “BM”, corresponds to the target binding region of the parent scaffold, which region constitutes two alpha helices within a three-helical bundle protein domain. In the parent scaffold, the varied amino acid residues of the two BM helices constitute a binding surface for interaction with the constant Fc part of antibodies. In the present disclosure, the random variation of binding surface residues and subsequent selection of variants have replaced the Fc interaction capacity with a capacity for interaction with IL-6.

[0026] As the skilled person will realize, the function of any polypeptide, such as the IL-6 binding capacity of the polypeptide of the present disclosure, is dependent on the tertiary structure of the polypeptide. It is therefore possible to make minor changes to the sequence of amino acids in a polypeptide without affecting the function thereof. Thus, the disclosure encompasses modified variants of the IL-6 binding polypeptide, which are such that the IL-6 binding characteristics are retained.

[0027] In this way, also encompassed by the present disclosure is an IL-6 binding polypeptide comprising an amino acid sequence with 93% or greater identity to a polypeptide as defined in i). In some embodiments, the polypeptide may comprise a sequence which is at least 96% identical to a polypeptide as defined in i). For example, it is possible that an amino acid residue belonging to a certain functional grouping of amino acid residues (e.g. hydrophobic, hydrophilic, polar etc) could be exchanged for another amino acid residue from the same functional group.

[0028] In some embodiments, such changes may be made in any position of the sequence of the IL-6 binding polypeptide as disclosed herein. In other embodiments, such changes may be made only in the non-variable positions, also denoted scaffold amino acid residues. In such cases, changes are not allowed in the variable positions, i.e. positions denoted with an “X” in sequence i).

[0029] The term “% identity”, as used throughout the specification, may for example be calculated as follows. The query sequence is aligned to the target sequence using the CLUSTAL W algorithm (Thompson et al, Nucleic Acids Research, 22: 4673-4680 (1994)). A comparison is made over the window corresponding to the shortest of the aligned sequences. The shortest of the aligned sequences may in some instances be the target sequence. In other instances, the query sequence may constitute the shortest of the aligned sequences. The amino acid residues at each position are compared and the percentage of positions in the query sequence that have identical correspondences in the target sequence is reported as % identity.

[0030] As used herein “Xₙ” and “Xₘ” are used to indicate amino acids in positions n and m in the sequence i) as defined above, wherein n and m are integers which indicate the position of an amino acid within said sequence as counted from the N-terminal end of said sequence. For example, X₃ and X₇ indicate the amino acid in position three and seven, respectively, from the N-terminal end of sequence i).

[0031] In embodiments according to the first aspect, there are provided polypeptides wherein Xₙ in sequence i) is independently selected from a group of possible residues according to Table 1. The skilled person will appreciate that Xₙ may be selected from any one of the listed groups of possible residues and that this selection is independent from the selection of amino acids in Xₘ, wherein n≠m. Thus, any of the listed possible residues in position Xₙ in Table 1 may be independently combined with any of the listed possible residues any other variable position in Table 1.

[0032] The skilled person will appreciate that Table 1 is to be read as follows: In one embodiment according to the first aspect, there is provided a polypeptide wherein amino acid residue “Xₙ” in sequence i) is selected from “Possible residues”. Thus, Table 1 discloses several specific and individualized embodiments of the first aspect of the present disclosure. For example, in one embodiment according to the first aspect, there is provided a polypeptide wherein X₃ in sequence i) is selected from A, H, K, Q, R and Y, and in another embodiment according to the first aspect, there is provided a polypeptide wherein X₃ in sequence i) is selected from A, K, Q, R and Y. For avoidance of doubt, the listed embodiments may be freely combined in yet other embodiments. For example, one such combined embodiment is a polypeptide in which X₃ is selected from A, K, R and Y, while X₄ is selected from H and K, and X₁₁ is selected from A, I, L and T.

TABLE 1
Embodiments of the first aspect of the present disclosure

| Xₙ | Possible residues |
|---|---|
| X₃ | A, F, H, K, Q, R, W, Y |
| X₃ | A, H, K, Q, R, S, W, Y |
| X₃ | A, H, K, Q, R, W, Y |
| X₃ | A, H, K, Q, R, Y |
| X₃ | A, K, Q, R, Y |
| X₃ | A, K, R, Y |
| X₃ | A, K, R |
| X₃ | A, R, Y |
| X₃ | K, R |
| X₃ | A, R |
| X₃ | R, Y |
| X₃ | R |
| X₃ | K |
| X₃ | A |
| X₃ | Y |
| X₄ | A, D, E, F, H, K, L, M, N, Q, R, S, T, V, Y |
| X₄ | A, D, E, F, H, I, K, M, N, Q, R, S, T, V, Y |
| X₄ | A, D, E, F, H, K, L, M, N, Q, R |
| X₄ | A, D, E, F, H, K, M, N, Q, R, S, T, V, Y |
| X₄ | A, D, E, F, H, K, N, Q, R, S, T, Y |
| X₄ | A, D, E, H, K, N, Q, R, S, T, Y |
| X₄ | A, D, E, H, K, Q, R, T |
| X₄ | A, D, E, F, H, K, M, Q, R, S, T, V, Y |
| X₄ | A, D, E, F, H, K, Q, R, S, T, V |
| X₄ | A, D, E, H, K, Q, R |
| X₄ | A, D, E, H, K, R |
| X₄ | D, E, H, K, R |
| X₄ | A, D, E, K, R |
| X₄ | A, D, E, H, K |
| X₄ | D, E, K, R |
| X₄ | A, D, E, K |
| X₄ | D, E, H, K |
| X₄ | D, H, K, Q |
| X₄ | E, H, K, R |
| X₄ | D, E, R |
| X₄ | D, E, K |
| X₄ | H, K, Q |
| X₄ | D, K, Q |
| X₄ | D, H, Q |
| X₄ | D, H, K |
| X₄ | E, H, K |
| X₄ | E, H, R |
| X₄ | H, K, R |
| X₄ | K, E, R |
| X₄ | D, E |
| X₄ | R, E |
| X₄ | K, E |
| X₄ | E, H |
| X₄ | D, K |
| X₄ | H, K |
| X₄ | K, Q |
| X₄ | K, D |
| X₄ | D, Q |
| X₄ | H, Q |
| X₄ | K |
| X₄ | H |
| X₄ | D |
| X₄ | Q |
| X₄ | E |
| X₄ | R |
| X₇ | F, H, I, K, L, M, N, R, T, V, W, Y |
| X₇ | F, H, I, K, L, M, N, R, T, W, Y |
| X₇ | F, H, I, L, M, N, R, T, W, Y |
| X₇ | F, H, K, L, M, N, R, S, T, V, W, Y |
| X₇ | F, H, K, L, M, N, R, T, V, W, Y |
| X₇ | F, H, K, L, M, N, R, T, W, Y |
| X₇ | F, H, L, M, N, R, T, W, Y |
| X₇ | F, H, R, T, W, Y |
| X₇ | F, I, N, R, T, W, Y |
| X₇ | F, I, R, W, Y |
| X₇ | F, N, R, W, Y |
| X₇ | F, R, T, W, Y |
| X₇ | F, H, T, W, Y |
| X₇ | F, H, W, Y |
| X₇ | F, T, W, Y |
| X₇ | F, R, W, Y |
| X₇ | F, H, L, M, R, T, V, W, Y |
| X₇ | F, H, R, T, W, Y |
| X₇ | I, R, W, Y |
| X₇ | F, W, Y |
| X₇ | F, R, Y |
| X₇ | R, W, Y |
| X₇ | I, R, Y |
| X₇ | I, W, Y |
| X₇ | F, Y |
| X₇ | W, Y |
| X₇ | I, Y |
| X₇ | R, Y |
| X₇ | F |
| X₇ | W |
| X₇ | Y |
| X₇ | I |
| X₇ | R |
| X₁₁ | A, I, K, L, N, R, S, T, V |
| X₁₁ | A, I, K, L, M, N, S, T, V |
| X₁₁ | A, I, K, L, N, S, T, V |
| X₁₁ | A, I, K, L, S, T, V |
| X₁₁ | A, I, K, L, N, T, V |
| X₁₁ | A, I, K, L, T, V |
| X₁₁ | A, I, K, L, T |
| X₁₁ | I, K, L, T |
| X₁₁ | A I, L, T |
| X₁₁ | A I, K, L |
| X₁₁ | A, K, L, N, S, T |
| X₁₁ | A, K, L, N, S |
| X₁₁ | A, K, L, S, T |
| X₁₁ | A, K, L, S |
| X₁₁ | K, L, S |
| X₁₁ | A, K, L |
| X₁₁ | A, I, L |
| X₁₁ | I, L |
| X₁₁ | A, L, N |
| X₁₁ | A, L |
| X₁₁ | L, N |
| X₁₁ | L |
| X₁₁ | A |
| X₁₁ | N |
| X₁₁ | S |
| X₁₁ | I |
| X₁₁ | K |
| X₁₁ | T |
| X₁₆ | N |
| X₁₆ | T |
| X₁₇ | I, T, V |
| X₁₇ | A, I, V |
| X₁₇ | I, V |
| X₁₇ | I |
| X₁₇ | V |
| X₁₈ | D, E, H, K, N, Q, R, S, T |
| X₁₈ | D, E, G, H, N, Q, R, S, T |
| X₁₈ | D, E, H, N, Q, R, S, T |
| X₁₈ | D, E, H, N, Q, S, T |
| X₁₈ | D, E, N, Q, S, T |
| X₁₈ | D, E, N, S, T |
| X₁₈ | D, E, Q, S, T |
| X₁₈ | D, E, S, T |
| X₁₈ | D, E, Q, S |
| X₁₈ | D, E, N, S |
| X₁₈ | D, E, S |
| X₁₈ | D, E, N |
| X₁₈ | D, E |
| X₁₈ | E |
| X₁₈ | D |
| X₂₀ | I, L, M, R, V |
| X₂₀ | I, M, R, T, V |
| X₂₀ | I, M, R, V |
| X₂₀ | I, L, M, V |
| X₂₀ | I, M, V |
| X₂₀ | I, M |
| X₂₀ | M, V |
| X₂₀ | M |
| X₂₁ | A, S, T |
| X₂₁ | A, S, V |
| X₂₁ | A, S |
| X₂₁ | A, V |
| X₂₁ | A, T |
| X₂₁ | A |
| X₂₅ | I, Q, S, T, V, W |
| X₂₅ | I, Q, S, T, V |
| X₂₅ | I, Q, S, T, W |
| X₂₅ | I, Q, S, T |
| X₂₅ | I, S, T |
| X₂₅ | Q, S, T |
| X₂₅ | S, T, W |
| X₂₅ | S, T |
| X₂₅ | S |
| X₂₅ | T |
| X₂₆ | K |
| X₂₆ | S |
| X₂₈ | F, L, Y |
| X₂₈ | F, M, Y |
| X₂₈ | F, L, M |
| X₂₈ | F, L |
| X₂₈ | F, Y |
| X₂₈ | F |
| X₂₉ | D |
| X₂₉ | R |

[0033] In one particular embodiment according to the first aspect, there is provided polypeptide wherein, in sequence i),

[0034] X₃ is selected from A, H, K, Q, R and Y;

[0035] X₄ is selected from A, D, E, F, H, I, K, L, M, N, Q, R, S, T, V and Y;

[0036] X₇ is selected from F, H, I, K, L, M, N, R, T, V, W and Y;

[0037] X₁₁ is selected from A, I, K, L, N, S, T and V;

[0038] X₁₆ is T;

[0039] X₁₇ is selected from A, I, T and V;

[0040] X₁₈ is selected from D, E, H, K, N, Q, R, S and T;

[0041] X₂₀ is selected from I, L, M, R and V;

[0042] X₂₁ is selected from A, S and V;

[0043] X₂₅ is selected from I, Q, S, T, V and W;

[0044] X₂₆ is K;

[0045] X₂₈ is selected from F, L, M and Y; and

[0046] X₂₉ is D.

[0047] In a more specific embodiment defining a sub-class of IL-6 binding polypeptides, sequence i) fulfills at least six of the eleven conditions I-XI:
[0048] I. X₃ is selected from K and R;
[0049] II. X₁₁ is selected from A and L;
[0050] III. X₁₆ is T;
[0051] IV. X₁₇ is selected from I and V;
[0052] V. X₁₈ is selected from D and E;
[0053] VI. X₂₀ is M;
[0054] VII. X₂₁ is A;
[0055] VIII. X₂₅ is selected from S and T;
[0056] IX. X₂₆ is K;
[0057] X. X₂₈ is F; and
[0058] XI. X₂₉ is D.

[0059] In some examples of an IL-6 binding polypeptide according to the first aspect, sequence i) fulfils at least seven of the eleven conditions I-XI. More specifically, sequence i) may fulfill at least eight of the eleven conditions I-XI, such as at least nine of the eleven conditions I-XI, such as at least ten of the eleven conditions I-XI, such as all of the eleven conditions I-XI.

[0060] In some embodiments of an IL-6 binding polypeptide according to the first aspect, there is provided an IL-6 binding polypeptide, wherein X₁₇X₂₀X₂₁ is selected from VMA and IMA. In some embodiments, X₂₀X₂₁X₂₈ is MAF. In some embodiments, X₁₇X₂₀X₂₈ is selected from VMF and IMF. In some embodiments, X₁₇X₂₁X₂₈ is selected from VAF and IAF.

[0061] As described in detail in the experimental section to follow, the selection of IL-6 binding polypeptide variants has led to the identification of a number of individual IL-6 binding motif (BM) sequences. These sequences constitute individual embodiments of sequence i) according to this aspect. The sequences of individual IL-6 binding motifs correspond to amino acid positions 8-36 in SEQ ID NO:1-1551 presented in FIG. 1. Hence, in one embodiment of the IL-6 binding polypeptide according to this aspect, sequence i) corresponds to the sequence from position 8 to position 36 in a sequence selected from the group consisting of SEQ ID NO:1-1551. In one embodiment, sequence i) corresponds to the sequence from position 8 to position 36 in a sequence selected from the group consisting of SEQ ID NO:1-1502. In one embodiment, sequence i) corresponds to the sequence from position 8 to position 36 in a sequence selected from the group consisting of SEQ ID NO:7, SEQ ID NO:15-89 and SEQ ID NO:151-871. In one embodiment, sequence i) corresponds to the sequence from position 8 to position 36 in a sequence selected from the group consisting of SEQ ID NO:1-6, SEQ ID NO:8-14, SEQ ID NO:90-150 and SEQ ID NO:872-1502. In one embodiment, sequence i) corresponds to the sequence from position 8 to position 36 in a sequence selected from the group consisting of SEQ ID NO:1-152 and SEQ ID NO:1503-1515. In one embodiment, sequence i) corresponds to the sequence from position 8 to position 36 in a sequence selected from the group consisting of SEQ ID NO:1-150 and SEQ ID NO:1503-1515. In one embodiment, sequence i) corresponds to the sequence from position 8 to position 36 in a sequence selected from the group consisting of SEQ ID NO:1-152. In another embodiment, sequence i) corresponds to the sequence from position 8 to position 36 in a sequence selected from the group consisting of SEQ ID NO:1-150. In yet another embodiment, sequence i) corresponds to the sequence from position 8 to position 36 in a sequence selected from the group consisting of SEQ ID NO:7, SEQ ID NO:15-89 and SEQ ID NO:151-152. In one embodiment, sequence i) corresponds to the sequence from position 8 to position 36 in a sequence selected from the group consisting of SEQ ID NO:1-6, SEQ ID NO:8-14 and SEQ ID NO:90-150. In one embodiment, sequence i) corresponds to the sequence from position 8 to position 36 in a sequence selected from the group consisting of SEQ ID NO:1-14 and SEQ ID NO:1503-1515. In one embodiment, sequence i) corresponds to the sequence from position 8 to position 36 in a sequence selected from the group consisting of SEQ ID NO:1-14 and SEQ ID NO:1512. In one embodiment, sequence i) corresponds to the sequence from position 8 to position 36 in a sequence selected from the group consisting of SEQ ID NO:1-14. In one embodiment, sequence i) corresponds to the sequence from position 8 to position 36 in a sequence selected from the group consisting of SEQ ID NO:1-5. In one embodiment, sequence i) corresponds to the sequence from position 8 to position 36 in SEQ ID NO:1512. In specific individual embodiments, sequence i) corresponds to the sequence from position 8 to position 36 in any one of SEQ ID NO:1-14 individually.

[0062] In some embodiments of the present disclosure, the BM as defined above “forms part of” a three-helix bundle protein domain. This is understood to mean that the sequence of the BM is “inserted” into or “grafted” onto the sequence of the original three-helix bundle domain, such that the BM replaces a similar structural motif in the original domain. For example, without wishing to be bound by theory, the BM is thought to constitute two of the three helices of a three-helix bundle, and can therefore replace such a two-helix motif within any three-helix bundle. As the skilled person will realize, the replacement of two helices of the three-helix bundle domain by the two BM helices has to be performed so as not to affect the basic structure of the polypeptide. That is, the overall folding of the Ca backbone of the polypeptide according to this embodiment of the invention is substantially the same as that of the three-helix bundle protein domain of which it forms a part, e.g. having the same elements of secondary structure in the same order etc. Thus, a BM according to the disclosure “forms part” of a three-helix bundle domain if the polypeptide according to this embodiment of the aspect has the same fold as the original domain, implying that the basic structural properties are shared, those properties e.g. resulting in similar CD spectra. The skilled person is aware of other parameters that are relevant.

[0063] In particular embodiments, the IL-6 binding motif (BM) thus forms part of a three-helix bundle protein domain. For example, the BM may essentially constitute two alpha helices with an interconnecting loop, within said three-helix bundle protein domain. In particular embodiments, said three-helix bundle protein domain is selected from domains of bacterial receptor proteins. Non-limiting examples of such domains are the five different three-helical domains of Protein A from Staphylococcus aureus, such as domain B, and derivatives thereof. In some embodiments, the three-helical bundle protein domain is a variant of protein Z, which is derived from domain B of staphylococcal Protein A.

[0064] In some embodiments where the IL-6 binding polypeptide as disclosed herein forms part of a three-helix bundle protein domain, the IL-6 binding polypeptide may comprise a binding module (BMod), the amino acid sequence of which is selected from:

iii)

K-[BM]-DPSQSXₐX_{b}LLX_{c}EAKKLX_{d}XₑX_{f}Q;

wherein

[0065] [BM] is an IL-6 binding motif as defined herein, provided that X₂₉ is D;

[0066] Xₐ is selected from A and S;

[0067] X_{b} is selected from N and E;

[0068] X_{c} is selected from A, S and C;

[0069] X_{d} is selected from E, N and S;

[0070] Xₑ is selected from D, E and S;

[0071] X_{f} is selected from A and S; and

[0072] iv) an amino acid sequence which has at least 91% identity to a sequence defined by iii).

[0073] It may be beneficial in some embodiments that said polypeptides exhibit high structural stability, such as resistance to isomerization, to chemical modifications, to changes in physical conditions and to proteolysis, during production and storage, as well as in vivo. Thus, in other embodiments where the IL-6 binding polypeptide as disclosed herein forms part of a three-helix bundle protein domain, the IL-6 binding polypeptide may comprise a binding module (BMod), the amino acid sequence of which is selected from:

v)
K-[BM]-QPEQSXₐX_{b}LLX_{c}EAKKLX_{d}XₑX_{f}Q,

wherein

[0074] [BM] is an IL-6 binding motif as defined herein, provided that X₂₉ is R;

[0075] Xₐ is selected from A and S;

[0076] X_{b} is selected from N and E;

[0077] X_{c} is selected from A, S and C;

[0078] X_{d} is selected from E, N and S;

[0079] Xₑ is selected from D, E and S;

[0080] X_{f} is selected from A and S; and

[0081] vi) an amino acid sequence which has at least 91% identity to a sequence defined by v).

[0082] As discussed above, polypeptides comprising minor changes as compared to the above amino acid sequences, which do not largely affect the tertiary structure and the function of the polypeptide are also within the scope of the present disclosure. Thus, in some embodiments, sequence iv) and vi) have at least 93%, such as at least 95%, such as at least 97% identity to a sequence defined by iii) and v), respectively.

[0083] In one embodiment, Xₐ in sequence iii) or v) is A.

[0084] In one embodiment, Xₐ in sequence iii) or v) is S.

[0085] In one embodiment, X_{b} in sequence iii) or v) is N.

[0086] In one embodiment, X_{b} in sequence iii) or v) is E.

[0087] In one embodiment, X_{c} in sequence iii) or v) is A.

[0088] In one embodiment, X_{c} in sequence iii) or v) is S.

[0089] In one embodiment, X_{c} in sequence iii) or v) is C.

[0090] In one embodiment, X_{d} in sequence iii) or v) is E.

[0091] In one embodiment, X_{d} in sequence iii) or v) is N.

[0092] In one embodiment, X_{d} in sequence iii) or v) is S.

[0093] In one embodiment, Xₑ in sequence iii) or v) is D.

[0094] In one embodiment, Xₑ in sequence iii) or v) is E.

[0095] In one embodiment, Xₑ in sequence iii) or v) is S.

[0096] In one embodiment, X_{d}Xₑ in sequence iii) or v) is selected from EE, ES, SE, SD and SS.

[0097] In one embodiment, X_{d}Xₑ in sequence iii) or v) is ES.

[0098] In one embodiment, X_{d}Xₑ in sequence iii) or v) is SE.

[0099] In one embodiment, X_{d}Xₑ in sequence iii) or v) is SD.

[0100] In one embodiment, X_{f} in sequence iii) or v) is A.

[0101] In one embodiment, X_{f} in sequence iii) or v) is S.

[0102] In one embodiment, in sequence iii) or v), Xₐ is A; X_{b} is N; X_{c} is A and X_{f} is A.

[0103] In one embodiment, in sequence iii) or v), Xₐ is A; X_{b} is N; X_{c} is C and X_{f} is A.

[0104] In one embodiment, in sequence iii) or v), Xₐ is S; X_{b} is E; X_{c} is S and X_{f} is S.

[0105] In one embodiment, in sequence iii) or v), Xₐ is S; X_{b} is E; X_{c} is C and X_{f} is S.

[0106] In one embodiment, in sequence iii) or v), Xₐ is A; X_{b} is N; X_{c} is A; X_{d}Xₑ is ND and X_{f} is A.

[0107] In one embodiment, in sequence iii) or v), Xₐ is A; X_{b} is N; X_{c} is C; X_{d}Xₑ is ND and X_{f} is A.

[0108] In one embodiment, in sequence iii) or v), Xₐ is S; X_{b} is E; X_{c} is S; X_{d}Xₑ is ND and X_{f} is S.

[0109] In one embodiment, in sequence iii) or v), Xₐ is S; X_{b} is E; X_{c} is C; X_{d}Xₑ is ND and X_{f} is S.

[0110] In one embodiment, in sequence iii) or v), Xₐ is A; X_{b} is N; X_{c} is A; X_{d}Xₑ is SE and X_{f} is A.

[0111] In one embodiment, in sequence iii) or v), Xₐ is A; X_{b} is N; X_{c} is C; X_{d}Xₑ is SE and X_{f} is A.

[0112] In one embodiment, in sequence iii) or v), Xₐ is S; X_{b} is E; X_{c} is S; X_{d}Xₑ is SE and X_{f} is S.

[0113] In one embodiment, in sequence iii) or v), Xₐ is S; X_{b} is E; X_{c} is C; X_{d}Xₑ is SE and X_{f} is S.

[0114] In one embodiment, in sequence iii) or v), Xₐ is A; X_{b} is N; X_{c} is A; X_{d}Xₑ is SD and X_{f} is A.

[0115] In one embodiment, in sequence iii) or v), Xₐ is A; X_{b} is N; X_{c} is C; X_{d}Xₑ is SD and X_{f} is A.

[0116] In one embodiment, in sequence iii) or v), Xₐ is S; X_{b} is E; X_{c} is S; X_{d}Xₑ is SD and X_{f} is S.

[0117] In one embodiment, in sequence iii) or v), Xₐ is S; X_{b} is E; X_{c} is C; X_{d}Xₑ is SD and X_{f} is S.

[0118] In one embodiment, in sequence iii) or v), Xₐ is A; X_{b} is N; X_{c} is A; X_{d}Xₑ is ES and X_{f} is A.

[0119] In one embodiment, in sequence iii) or v), Xₐ is A; X_{b} is N; X_{c} is C; X_{d}Xₑ is ES and X_{f} is A.

[0120] In one embodiment, in sequence iii) or v), Xₐ is S; X_{b} is E; X_{c} is S; X_{d}Xₑ is ES and X_{f} is S.

[0121] In one embodiment, in sequence iii) or v), Xₐ is S; X_{b} is E; X_{c} is C; X_{d}Xₑ is ES and X_{f} is S.

[0122] In yet a further embodiment, sequence iii) corresponds to the sequence from position 7 to position 55 in a sequence selected from the group consisting of SEQ ID NO:1-1551 presented in FIG. 1. In another embodiment, sequence iii) corresponds to the sequence from position 7 to position 55 in a sequence selected from the group consisting of SEQ ID NO:1-1502. In one embodiment, sequence iii) corresponds to the sequence from position 7 to position 55 in a sequence selected from the group consisting of SEQ ID NO:7, SEQ ID NO:15-89 and SEQ ID NO:151-871. In one embodiment, sequence iii) corresponds to the sequence from position 7 to position 55 in a sequence selected from the group consisting of SEQ ID NO:1-6, SEQ ID NO:8-14, SEQ ID NO:90-150 and SEQ ID NO:872-1502. In one embodiment, sequence iii) corresponds to the sequence from position 7 to position 55 in a sequence selected from the group consisting of SEQ ID NO:1-152 and SEQ ID NO:1503-1515. In one embodiment, sequence iii) corresponds to the sequence from position 7 to position 55 in a sequence selected from the group consisting of SEQ ID NO:1-150 and SEQ ID NO:1503-1515. In one embodiment, sequence iii) corresponds to the sequence from position 7 to position 55 in a sequence selected from the group consisting of SEQ ID NO:1-152. In another embodiment, sequence iii) corresponds to the sequence from position 7 to position 55 in a sequence selected from the group consisting of SEQ ID NO:1-150. In yet another embodiment, sequence iii) corresponds to the sequence from position 7 to position 55 in a sequence selected from the group consisting of SEQ ID NO:7, SEQ ID NO:15-89 and SEQ ID NO:151-152. In one embodiment, sequence iii) corresponds to the sequence from position 7 to position 55 in a sequence selected from the group consisting of SEQ ID NO:1-6, SEQ ID NO:8-14 and SEQ ID NO:90-150. In one embodiment, sequence iii) corresponds to the sequence from position 7 to position 55 in a sequence selected from the group consisting of SEQ ID NO:1-14 and SEQ ID NO:1503-1515. In one embodiment, sequence iii) corresponds to the sequence from position 7 to position 55 in a sequence selected from the group consisting of SEQ ID NO:1-14 and SEQ ID NO:1512. In one embodiment, sequence iii) corresponds to the sequence from position 7 to position 55 in a sequence selected from the group consisting of SEQ ID NO:1-14. In one embodiment, sequence iii) corresponds to the sequence from position 7 to position 55 in a sequence selected from the group consisting of SEQ ID NO:1-5. In one embodiment, sequence iii) corresponds to the sequence from position 7 to position 55 in sequence SEQ ID NO:1512. In specific individual embodiments, sequence iii) corresponds to the sequence from position 7 to position 55 in any one of SEQ ID NO:1-14 individually.

[0123] Also, in a further embodiment, there is provided an IL-6 binding polypeptide, which comprises an amino acid sequence selected from:
[0124] vii) YA-[BMod]-AP;
[0125] wherein [BMod] is an IL-6 binding module as defined above; and
[0126] viii) an amino acid sequence which has at least 90% identity to a sequence defined by vii).

[0127] Alternatively, there is provided an IL-6 binding polypeptide, which comprises an amino acid sequence selected from:
[0128] ix) FN-[BMod]-AP;
[0129] wherein [BMod] is an IL-6 binding module as defined above; and
[0130] x) an amino acid sequence which has at least 90% identity to a sequence defined by ix).

[0131] As discussed above, polypeptides comprising minor changes as compared to the above amino acid sequences, which do not largely affect the tertiary structure and the function of the polypeptide, also fall within the scope of the present disclosure. Thus, in some embodiments, sequence viii) and x) may for example be least 92%, such as at least 94%, such as at least 96%, such as at least 98% identical to a sequence defined by vii) and ix), respectively.

[0132] In some embodiments, the IL-6 binding motif may form part of a polypeptide comprising an amino acid sequence selected from

ADNNFNK-[BM]-DPSQSANLLSEAKKLNESQAPK;
ADNKFNK-[BM]-DPSQSANLLAEAKKLNDAQAPK;
ADNKFNK-[BM]-DPSVSKEILAEAKKLNDAQAPK;
ADAQQNNFNK-[BM]-DPSQSTNVLGEAKKLNESQAPK;
AQHDE-[BM]-DPSQSANVLGEAQKLNDSQAPK;
VDNKFNK-[BM]-DPSQSANLLAEAKKLNDAQAPK;
AEAKYAK-[BM]-DPSESSELLSEAKKLNKSQAPK;
VDAKYAK-[BM]-DPSQSSELLAEAKKLNDAQAPK;
VDAKYAK-[BM]-DPSQSSELLAEAKKLNDSQAPK;
AEAKYAK-[BM]-DPSQSSELLSEAKKLNDSQAPK;
AEAKYAK-[BM]-DPSQSSELLSEAKKLSESQAPK;
AEAKYAK-[BM]-QPEQSSELLSEAKKLSESQAPK;
AEAKYAK-[BM]-DPSQSSELLSEAKKLESSQAPK;
AEAKYAK-[BM]-QPEQSSELLSEAKKLESSQAPK;
VDAKYAK-[BM]-DPSQSSELLSEAKKLNDSQAPK;
VDAKYAK-[BM]-DPSQSSELLSEAKKLSESQAPK;
VDAKYAK-[BM]-QPEQSSELLSEAKKLSESQAPK;
VDAKYAK-[BM]-DPSQSSELLSEAKKLESSQAPK;
VDAKYAK-[BM]-QPEQSSELLSEAKKLESSQAPK;
VDAKYAK-[BM]-DPSQSSELLAEAKKLNKAQAPK;
and
AEAKYAK-[BM]-DPSQSSELLAEAKKLNKAQAPK;

wherein [BM] is an IL-6 binding motif as defined above.

[0133] In one embodiment, the IL-6 binding polypeptide comprises an amino acid sequence selected from:
[0134] xi)

VDAKYAK-[BM]-DPSQSSELLSEAKKLNDSQAPK;

[0135] wherein [BM] is an IL-6 binding motif as defined above; and
[0136] xii) an amino acid sequence which has at least 89% identity to the sequence defined in xi).

[0137] In another embodiment, the IL-6 binding polypeptide comprises an amino acid sequence selected from:
[0138] xiii)

AEAKYAK-[BM]-DPSQSSELLSEAKKLNDSQAPK;

[0139] wherein [BM] is an IL-6 binding motif as defined above; and
[0140] xiv) an amino acid sequence which has at least 89% identity to the sequence defined in xiii).

[0141] Again, polypeptides comprising minor changes as compared to the above amino acid sequences, which do not largely affect the tertiary structure and the function of the polypeptide, also fall within the scope of the present disclosure. Thus, in some embodiments, sequence xii) and xiv) may for example be at least 91%, such as at least 93%, such as at least 94%, such as at least 96%, such as at least 98% identical to the sequence defined by xi) and xiii), respectively.

[0142] Sequence xi) in such a polypeptide may be selected from the group consisting of SEQ ID NO:1-1551. In another embodiment, sequence xi) is selected from the group consisting of SEQ ID NO:1-1502. In one embodiment, sequence xi) is selected from the group consisting of SEQ ID NO:7, SEQ ID NO:15-89 and SEQ ID NO:151-871. In one embodiment, sequence xi) is selected from the group consisting of SEQ ID NO:1-6, SEQ ID NO:8-14, SEQ ID NO:90-150 and SEQ ID NO:872-1502. In one embodiment, sequence xi) is selected from the group consisting of SEQ ID NO:1-152 and SEQ ID NO:1503-1515. In one embodiment, sequence xi) is selected from the group consisting of SEQ ID NO:1-150 and SEQ ID NO:1503-1515. In one embodiment, sequence xi) is selected from the group consisting of SEQ ID NO:1-152. In another embodiment, sequence xi) is selected from the group consisting of SEQ ID NO:1-150. In yet another embodiment, sequence xi) is selected from the group consisting of SEQ ID NO:7, SEQ ID NO:15-89 and SEQ ID NO:151-152. In one embodiment, sequence xi) is selected from the group consisting of SEQ ID NO:1-6, SEQ ID NO:8-14 and SEQ ID NO:90-150. In one embodiment, sequence xi) is selected from the group consisting of SEQ ID NO:1-14 and SEQ ID NO:1503-1515. In one embodiment, sequence xi) is selected from the group consisting of SEQ ID NO:1-14 and SEQ ID NO:1512. In one embodiment, sequence xi) is selected from the group consisting of SEQ ID NO:1-14. In one embodiment, sequence xi) is selected from the group consisting of SEQ ID NO:1-5. In one embodiment, sequence xi) is SEQ ID NO:1512. In specific individual embodiments, sequence xi) is any one of SEQ ID NO:1-14 individually.

[0143] Binding of a polypeptide as defined herein to IL-6 may interfere with canonical cis- and/or with trans-signaling via IL-6 in vivo or in vitro. Thus, in one embodiment, there is provided an IL-6 binding polypeptide as defined herein which is capable of blocking IL-6 dependent signaling via the cis-signaling pathway. In another embodiment, the IL-6 binding polypeptide as defined herein is capable of blocking IL-6 dependent signaling via the trans-signaling pathway. In another embodiment, the IL-6 binding polypeptide as defined herein is capable of blocking IL-6 dependent signaling via both the cis-signaling pathway and the trans-signaling pathway.

[0144] The half maximal inhibitory concentration (1050) is a measure of the effectiveness of a substance in inhibiting a specific biological or biochemical function. This quantitative measure indicates how much of a particular substance is needed to inhibit a given biological process by half, and is commonly used in the art. In one particular embodiment, there is provided an IL-6 binding polypeptide as defined herein capable of blocking IL-6 signaling such that the half maximal inhibitory concentration (1050) of the blocking is at most 1×10⁻⁶ M, such as at most 1×10⁻⁷ M, such as at most 1×10⁻⁸ M, such as at most 1×10⁻⁹ M, such as at most 1×10⁻¹⁰ M. This blocking may be blocking of either the cis- or the trans-signaling pathway. In one embodiment, the IL-6 binding polypeptide is capable of blocking the interaction of IL-6/IL-6Rα with gp130.

[0145] The terms “IL-6 binding” and “binding affinity for IL-6” as used in this specification refer to a property of a polypeptide which may be tested for example by ELISA or the use of surface plasmon resonance (SPR) technology. For example as described in the examples below, IL-6 binding affinity may be tested in an experiment in which samples of the polypeptide are captured on antibody-coated ELISA plates and biotinylated IL-6 is added followed by streptavidin-conjugated HRP. TMB substrate is added and the absorbance at 450 nm is measured using a multi-well plate reader, such as Victor³ (Perkin Elmer). The skilled person may then interpret the results obtained by such experiments to establish at least a qualitative measure of the binding affinity of the polypeptide for IL-6. If a quantitative measure is desired, for example to determine the EC50 value (the half maximal effective concentration) for the interaction, ELISA may also be used. The response of the polypeptide against a dilution series of biotinylated IL-6 is measured using ELISA as described above. The skilled person may then interpret the results obtained by such experiments, and EC50 values may be calculated from the results using for example GraphPad Prism 5 and non-linear regression.

[0146] IL-6 binding affinity may also be tested in an experiment in which IL-6, or a fragment thereof, is immobilized on a sensor chip of a surface plasmon resonance (SPR) instrument, and the sample containing the polypeptide to be tested is passed over the chip. Alternatively, the polypeptide to be tested is immobilized on a sensor chip of the instrument, and a sample containing IL-6, or a fragment thereof, is passed over the chip. The skilled person may then interpret the results obtained by such experiments to establish at least a qualitative measure of the binding affinity of the polypeptide for IL-6. If a quantitative measure is desired, for example to determine a K_{D} value for the interaction, surface plasmon resonance methods may also be used. Binding values may for example be defined in a Biacore (GE Healthcare) or ProteOn XPR 36 (Bio-Rad) instrument. IL-6 is suitably immobilized on a sensor chip of the instrument, and samples of the polypeptide whose affinity is to be determined are prepared by serial dilution and injected in random order. K_{D} values may then be calculated from the results using for example the 1:1 Langmuir binding model of the BlAevaluation 4.1 software, or other suitable software, provided by the instrument manufacturer.

[0147] Thus, in one embodiment, there is provided an IL-6 binding polypeptide as defined herein, which is capable of binding to IL-6 such that the EC50 value of the interaction is at most 1×10⁻⁷ M, such as at most 1×10⁻⁸ M, such as at most 1×10⁻⁹ M, such as at most 1×10⁻¹⁰ M.

[0148] In one embodiment, the IL-6 binding polypeptide is capable of binding to IL-6 such that the K_{D} value of the interaction is at most 1×10⁻⁸ M, such as at most 1×10⁻⁹ M, such as at most 1×10⁻¹⁰ M.

[0149] The skilled person will understand that various modifications and/or additions can be made to an IL-6 binding polypeptide according to any aspect disclosed herein in order to tailor the polypeptide to a specific application without departing from the scope of the present disclosure.

[0150] For example, in one embodiment there is provided an IL-6 binding polypeptide as described herein, which polypeptide has been extended by and/or comprises additional amino acids at the C terminus and/or N terminus. Such a polypeptide should be understood as a polypeptide having one or more additional amino acid residues at the very first and/or the very last position in the polypeptide chain. Thus, an IL-6 binding polypeptide may comprise any suitable number of additional amino acid residues, for example at least one additional amino acid residue. Each additional amino acid residue may individually or collectively be added in order to, for example, improve production, purification, stabilization in vivo or in vitro, coupling or detection of the polypeptide. Such additional amino acid residues may comprise one or more amino acid residues added for the purpose of chemical coupling. One example of this is the addition of a cysteine residue. Additional amino acid residues may also provide a “tag” for purification or detection of the polypeptide, such as a His₆ tag, a (HisGlu)₃ tag (“HEHEHE” tag) or a “myc” (c-myc) tag or a “FLAG” tag for interaction with antibodies specific to the tag or immobilized metal affinity chromatography (IMAC) in the case of a His₆-tag.

[0151] The further amino acids as discussed above may be coupled to the IL-6 binding polypeptide by means of chemical conjugation (using known organic chemistry methods) or by any other means, such as expression of the IL-6 binding polypeptide as a fusion protein or joined in any other fashion, either directly or via a linker, for example an amino acid linker.

[0152] The further amino acids as discussed above may for example comprise one or more polypeptide domain(s). A further polypeptide domain may provide the IL-6 binding polypeptide with another function, such as for example yet another binding function, an enzymatic function, a toxic function, a fluorescent signaling function or combinations thereof.

[0153] A further polypeptide domain may moreover provide another IL-6 binding moiety with the same IL-6 binding function. Thus, in a further embodiment, there is provided an IL-6 binding polypeptide in a multimeric form. Said multimer is understood to comprise at least two IL-6 binding polypeptides as disclosed herein as monomer units, the amino acid sequences of which may be the same or different. Multimeric forms of the polypeptides may comprise a suitable number of domains, each having an IL-6 binding motif, and each forming a monomer within the multimer. These domains may have the same amino acid sequence, but alternatively, they may have different amino acid sequences. In other words, the IL-6 binding polypeptide of the invention may form homo- or heteromultimers, for example homo- or heterodimers. In one embodiment, there is provided an IL-6 binding polypeptide, wherein said monomeric units are covalently coupled together. In another embodiment, said IL-6 binding polypeptide monomer units are expressed as a fusion protein. In one embodiment, there is provided an IL-6 binding polypeptide in dimeric form.

[0154] Additionally, “heterogenic” fusion polypeptides or proteins, or conjugates, in which an IL-6 binding polypeptide described herein, or multimer thereof, constitutes a first domain, or first moiety, and the second and further moieties have other functions than binding IL-6, are also contemplated and fall within the ambit of the present disclosure. The second and further moiety/moieties of the fusion polypeptide or conjugate in such a protein suitably also have a desired biological activity.

[0155] Thus, in a second aspect of the present disclosure, there is provided a fusion protein or a conjugate, comprising a first moiety consisting of an IL-6 binding polypeptide according to the first aspect, and a second moiety consisting of a polypeptide having a desired biological activity. In another embodiment, said fusion protein or conjugate may additionally comprise further moieties, comprising desired biological activities that can be either the same or different from the biological activity of the second moiety.

[0156] Non-limiting examples of a desired biological activity comprise a therapeutic activity, a binding activity and an enzymatic activity. In one embodiment, the second moiety having a desired biological activity is a therapeutically active polypeptide.

[0157] Non-limiting examples of therapeutically active polypeptides are biomolecules, such as molecules selected from the group consisting of human endogenous enzymes, hormones, growth factors, chemokines, cytokines and lymphokines.

[0158] Non-limiting examples of binding activities are binding activities which increase the in vivo half-life of the fusion protein or conjugate, and binding activities which act to block a biological activity. In one particular embodiment, the binding activity is an albumin binding activity which increases the in vivo half-life of the fusion protein or conjugate. In one embodiment, said albumin binding activity is provided by the albumin binding domain of streptococcal protein G or a derivative thereof.

[0159] In one embodiment of this aspect of the present disclosure, there is provided an IL-6 binding polypeptide, fusion protein or conjugate which comprises an additional immune response modifying agent. Non-limiting examples of additional immune response modifying agents include immunosuppressive or immunomodulating agents or other anti-inflammatory agents. For example, an IL-6 binding polypeptide, fusion protein or conjugate as described herein may be used in combination with disease-modifying antirheumatic drugs (DMARDs), such as gold salts, azathioprine, methotrexate and leflunomide; calcineurin inhibitors, such as cyclosporin A or FK 506; modulators of lymphocyte recirculation; mTOR inhibitors, such as rapamycin; an ascomycin having immuno-suppressive properties; glucocorticoids; corticosteroids; cyclophosphamide; immunosuppressive monoclonal antibodies; adhesion molecule inhibitors, such as LFA-1 antagonists, ICAM-1 or -3 antagonists, VCAM-4 antagonists or VLA-4 antagonists; anti-TNF agents, such as etanercept or monoclonal antibodies to TNF, for example infliximab, adalimumab, golimumab and certolizumab pegol; blockers of proinflammatory cytokines; IL-1 blockers such as anakinra or IL-1 trap; IL-17 blockers; chemokine blockers; non steroidal anti-inflammatory drugs (NSAIDs) such as aspirin; and anti-infectious agents and other immune response modulating agents. Thus, in one embodiment, said immune response modifying agent is selected from the group consisting of disease-modifying antirheumatic drugs (DMARDs), calcineurin inhibitors, modulators of lymphocyte recirculation, mTOR inhibitors, ascomycin having immuno-suppressive properties, glucocorticoids, corticosteroids, cyclo-phosphamide, immunosuppressive monoclonal antibodies, adhesion molecule inhibitors, anti-TNF agents, blockers of proinflammatory cytokines, IL-1 blockers, IL-17 blockers, chemokine blockers, non steroidal anti-inflammatory drugs (NSAIDs) and combinations thereof.

[0160] As the skilled person understands, the IL-6 binding polypeptide according to the first aspect may be useful in a fusion protein or as a conjugate partner to any other moiety. Therefore, the above lists of therapeutically active polypeptides and immune response modifying agents should not be construed as limiting in any way.

[0161] The skilled person is aware that the construction of a fusion protein often involves the use of linkers between the functional moieties to be fused, and there are different kinds of linkers with different properties, such as flexible amino acid linkers, rigid amino acid linkers and cleavable amino acid linkers. Linkers have been used to for example increase stability or improve folding of fusion proteins, to increase expression, improve biological activity, enable targeting and alter pharmacokinetics of fusion proteins. Thus, in one embodiment, a fusion protein as disclosed herein further comprises at least one linker, such as at least one linker selected from flexible amino acid linkers, rigid amino acid linkers and cleavable amino acid linkers.

[0162] Flexible linkers are often used in the art when the joined domains require a certain degree of movement or interaction, and may be particularly useful in some embodiments. Such linkers are generally composed of small, non-polar (for example G) or polar (for example S or T) amino acids. Some flexible linkers primarily consist of stretches of G and S residues, for example (GGGGS)ₚ. Adjusting the copy number “p” allows for optimization of linker in order to achieve appropriate separation between the functional moieties or to maintain necessary inter-moiety interaction. Apart from G and S linkers, other flexible linkers are known in the art, such as G and S linkers containing additional amino acid residues, such as T and A, to maintain flexibility, as well as polar amino acid residues to improve solubility. Examples of flexible linkers that are contemplated for use herein also include KESGSVSSEQLAQFRSLD, EGKSSGSGSEKST and GSAGSAAGSGEF.

[0163] Thus in one embodiment, said linker is a flexible linker comprising glycine (G), serine (S) and/or threonine (T) residues. In one embodiment, said linker has a general formula selected from (GₙSₘ)ₚ and (SₘGₙ)ₚ, wherein, independently, n=1-7, m=0-7, n+m≦8 and p=1-7. In one embodiment, n=1-5. In one embodiment, m=0-5. In one embodiment, p=1-5. In a more specific embodiment, n=4, m=1 and p=1-4. In an even more specific embodiment, said linker is (GGGGS)₃. In another specific embodiment, said linker is GGGGS. In another specific embodiment, said linker is VDGS. In another specific embodiment, said linker is ASGS.

[0164] The above aspects furthermore encompass polypeptides in which the IL-6 binding polypeptide according to the first aspect, or the IL-6 binding polypeptide as comprised in a fusion protein or conjugate according to the second aspect, further comprises a label, such as a label selected from the group consisting of fluorescent dyes and metals, chromophoric dyes, chemiluminescent compounds and bioluminescent proteins, enzymes, radionuclides and radioactive particles. Such labels may for example be used for detection of the polypeptide.

[0165] For example, in embodiments where the labeled IL-6 binding polypeptide comprises an IL-6 binding polypeptide according to the first aspect of the disclosure and a label, the labeled polypeptide may for example be used for indirect labeling of IL-6 expressing cells, such as cells of inflammation associated cancers.

[0166] In other embodiments, the labeled IL-6 binding polypeptide is present as a moiety in a fusion protein or conjugate also comprising a second moiety having a desired biological activity. The label may in some instances be coupled only to the IL-6 binding polypeptide, and in some instances both to the IL-6 binding polypeptide and to the second or further moiety of the conjugate or fusion protein. Furthermore, it is also possible that the label may be coupled to a second or further moiety only and not the IL-6 binding moiety. Hence, in yet another embodiment there is provided an IL-6 binding polypeptide comprising a second and optionally a further moiety, wherein said label is coupled to said second or further moiety only.

[0167] In embodiments where the IL-6 binding polypeptide, fusion protein or conjugate is radiolabeled, such a radiolabeled polypeptide may comprise a radionuclide. A majority of radionuclides have a metallic nature and metals are typically incapable of forming stable covalent bonds with elements presented in proteins and peptides. For this reason, labeling of proteins and peptides with radioactive metals is performed with the use of chelators, i.e. multidentate ligands, which form non-covalent compounds, called chelates, with the metal ions. In an embodiment of the IL-6 binding polypeptide, fusion protein or conjugate, the incorporation of a radionuclide is enabled through the provision of a chelating environment, through which the radionuclide may be coordinated, chelated or complexed to the polypeptide.

[0168] One example of a chelator is the polyaminopolycarboxylate type of chelator. Two classes of such polyaminopolycarboxylate chelators can be distinguished: macrocyclic and acyclic chelators.

[0169] In one embodiment, the IL-6 binding polypeptide, fusion protein or conjugate comprises a chelating environment provided by a polyaminopolycarboxylate chelator conjugated to the IL-6 binding polypeptide via a thiol group of a cysteine residue or an epsilon amine group of a lysine residue.

[0170] The most commonly used macrocyclic chelators for radioisotopes of indium, gallium, yttrium, bismuth, radioactinides and radiolanthanides are different derivatives of DOTA (1,4,7,10-tetraazacyclododecane-1,4,7,10-tetraacetic acid). In one embodiment, a chelating environment of the IL-6 binding polypeptide, fusion protein or conjugate is provided by DOTA or a derivative thereof. More specifically, in one embodiment, the chelating polypeptides encompassed by the present disclosure are obtained by reacting the DOTA derivative 1,4,7,10-tetraazacyclododecane-1,4,7-tris-acetic acid-10-maleimidoethylacetamide (maleimidomonoamide-DOTA) with said polypeptide.

[0171] Additionally, 1,4,7-triazacyclononane-1,4,7-triacetic acid (NOTA) and derivatives thereof may be used as chelators. Hence, in one embodiment, there is provided a IL-6 binding polypeptide, fusion protein or conjugate, wherein the polyaminopolycarboxylate chelator is 1,4,7-triazacyclononane-1,4,7-triacetic acid or a derivative thereof.

[0172] The most commonly used acyclic polyaminopolycarboxylate chelators are different derivatives of DTPA (diethylenetriamine-pentaacetic acid). Hence, polypeptides having a chelating environment provided by diethylenetriaminepentaacetic acid or derivatives thereof are also encompassed by the present disclosure.

[0173] In further aspects of the present disclosure, there is provided a polynucleotide encoding an IL-6 binding polypeptide or a fusion protein as described herein; an expression vector comprising said polynucleotide; and a host cell comprising said expression vector.

[0174] Also encompassed by this disclosure is a method of producing a polypeptide or fusion protein as described above, comprising culturing said host cell under conditions permissive of expression of said polypeptide from its expression vector, and isolating the polypeptide.

[0175] The IL-6 binding polypeptide of the present disclosure may alternatively be produced by non-biological peptide synthesis using amino acids and/or amino acid derivatives having protected reactive side-chains, the non-biological peptide synthesis comprising
[0176] step-wise coupling of the amino acids and/or the amino acid derivatives to form a polypeptide according to the first aspect having protected reactive side-chains,
[0177] removal of the protecting groups from the reactive side-chains of the polypeptide, and
[0178] folding of the polypeptide in aqueous solution.

[0179] It should be understood that the IL-6 binding polypeptide according to the present disclosure may be useful as a therapeutic, diagnostic or prognostic agent in its own right or as a means for targeting other therapeutic or diagnostic agents, with e.g. direct or indirect effects on IL-6. A direct therapeutic effect may for example be accomplished by inhibiting IL-6 signaling.

[0180] The small size and robustness of the molecules of the present disclosure confer several advantages over conventional monoclonal antibody based therapies. Such advantages include modes of administration, such as alternative routes of administration, administration at higher doses than antibodies and absence of Fc-mediated side effects. The small size combined with the potential for very high solubility and stability of the polypeptides disclosed herein allows for extreme molar amounts of drug in a small volume, for example for subcutanous injections. For systemic administration, this suggests outpatient “home use” treatment using convenient, small prefilled syringes or auto-injectors, with low volume and well tolerated administration of doses. In addition, the capacity for high molar concentrations in drug preparations in combination with the ability to retain functional stability in diverse formulations opens up for topical (for example skin or lung) or oral administration routes. Non-limiting examples of indications where alternative administration routes could be especially relevant in IL-6 mediated disease include asthma and psoriasis.

[0181] In another aspect, there is provided a composition comprising an IL-6 binding polypeptide, fusion protein or conjugate as described herein and at least one pharmaceutically acceptable excipient or carrier. In one embodiment, said composition further comprises at least one additional active agent, such as at least two additional active agents, such as at least three additional active agents. Non-limiting examples of additional active agents that may prove useful in such combination are immune response modifying agents and anti-cancer agents as described herein.

[0182] Non-limiting examples of anti-cancer agents include agents selected from the group consisting of auristatin, anthracycline, calicheamycin, combretastatin, doxorubicin, duocarmycin, the CC-1065 anti-tumor antibiotic, ecteinsascidin, geldanamycin, maytansinoid, methotrexate, mycotoxin, taxol, ricin, bouganin, gelonin, pseudomonas exotoxin 38 (PE38), diphtheria toxin (DT), and their analogues, and derivates thereof and combinations thereof. A skilled person would appreciate that the non-limiting examples of cytotoxic agents include all possible variant of said agents, for example the agent auristatin includes for example auristatin E, auristatin F, auristatin PE, and derivates thereof.

[0183] The skilled person will appreciate that said IL-6 binding polypeptide, fusion protein or conjugate or a composition comprising an anti-IL-6 binding polypeptide, fusion protein or conjugate as described herein may be administered to a subject using standard administration techniques, including oral, topical, intravenous, intraperitoneal, subcutaneous, pulmonary, transdermal, intramuscular, intranasal, buccal, sublingual or suppository administration. Thus, in one embodiment, there is provided an IL-6 binding polypeptide, fusion protein or conjugate or a composition as described herein for oral, topical, intravenous, intraperitoneal, subcutaneous, pulmonary, transdermal, intramuscular, intranasal, buccal, sublingual or suppository administration.

[0184] IL-6 may also serve as a valuable marker for diagnosis and prognosis of certain cancers, such as inflammation associated-cancers, for example lung cancer, breast cancer and colon cancer. For example, IL-6 has been linked to the prognosis and poor survival in patients suffering from colorectal cancer (Ky et al., Jpn J Clin Oncol. 2010 June; 40 (6):580-7).

[0185] Hence, in another aspect of the present disclosure, there is provided an IL-6 binding polypeptide, fusion protein, conjugate or composition as described herein for use as a medicament, a prognostic agent or a diagnostic agent. In one embodiment, said IL-6 binding polypeptide is provided for use as a medicament.

[0186] In one embodiment, there is provided an IL-6 binding polypeptide, fusion protein or conjugate or composition as described herein, for use as a medicament to modulate IL-6 function in vivo. As used herein, the term “modulate” refers to changing the activity, such as rendering IL-6 function hypomorph, partially inhibiting or fully inhibiting IL-6 function.

[0187] Non-limiting examples of IL-6 related disorders, wherein the IL-6 binding polypeptides may be useful for treatment, prognosis and/or diagnosis, include inflammatory disease, autoimmune disease, infectious disease, cancer, diabetes, neurological disease and depression, such as rheumatoid arthritis (RA), juvenile RA, juvenile idiopathic arthritis or systemic juvenile idiopathic arthritis, vasculitis, psoriatic arthritis, psoriasis, ankylosing spondylitis, chronic inflammatory bowel disease such as Crohn's disease and ulcerative colitis; Grave's disease, Behcet's disease, uveitis, giant cell arteritis, multiple sclerosis (MS), systemic sclerosis, systemic lupus erythematosus (SLE), polymyositis, polymyalgia rheumatic, asthma, chronic obstructive pulmonary disease (COPD), relapsing polychondritis, pancreatitis, peritonitis, nephritis, Kawasaki's disease, Sjögren's syndrome, adult Still's disease, colitis associated cancer, renal cancer, kidney cancer, prostate cancer, malignant lymphoma, multiple myeloma, Castleman's disease, breast cancer, lung cancer, Alzheimer's disease, HIV, diabetes, sepsis, cachexia, myelodysplastic syndrome (MDS), liver cirrhosis, graft versus host disease, myocardial infarction, endometriosis and osteoporosis. Non-limiting examples of IL-6 related cancers include lung cancer, breast cancer and colon cancer (Schafer and Brugge, J Clin Invest. (2007) 117 (12): 3660-3663; Nagasaki et al., British Journal of Cancer (2014) 110, 469-478).

[0188] Thus, in one embodiment, there is provided an IL-6 binding polypeptide, fusion protein, conjugate or composition for use in the treatment, prognosis or diagnosis of an IL-6 related disorder, such as a disorder selected from the group consisting of inflammatory disease, autoimmune disease, infectious disease, cancer, diabetes, neurological disease and depression. In one embodiment, said IL-6 related disorder is selected from the group consisting of inflammatory diseases and autoimmune diseases. In one embodiment, said IL-6 related disorder is selected from the group consisting of rheumatoid arthritis (RA), juvenile RA, juvenile idiopathic arthritis or systemic juvenile idiopathic arthritis, vasculitis, psoriatic arthritis, psoriasis, ankylosing spondylitis, chronic inflammatory bowel disease such as Crohn's disease and ulcerative colitis; Grave's disease, Behcet's disease, uveitis, giant cell arteritis, multiple sclerosis (MS), systemic sclerosis, systemic lupus erythematosus (SLE), polymyositis, polymyalgia rheumatic, asthma, chronic obstructive pulmonary disease (COPD), relapsing polychondritis, pancreatitis, peritonitis, nephritis, Kawasaki's disease, Sjögren's syndrome and adult Still's disease. In another embodiment, said IL-6 related disorder is cancer, such as a cancer selected from the group consisting of colitis associated cancer, renal cancer, kidney cancer, prostate cancer, malignant lymphoma, multiple myeloma, Castleman's disease, breast cancer and lung cancer. In another embodiment, said IL-6 related disorder is selected from Alzheimer's disease, HIV, diabetes, sepsis, cachexia, myelodysplastic syndrome (MDS), liver cirrhosis, graft versus host disease, myocardial infarction, endometriosis and osteoporosis.

[0189] In a related aspect, there is provided a method of treatment of an IL-6 related disorder, comprising administering to a subject in need thereof an effective amount of an IL-6 binding polypeptide, fusion protein, conjugate or composition as described herein. In a more specific embodiment of said method, the IL-6 binding polypeptide, fusion protein, conjugate or composition as described herein modulates IL-6 function in vivo.

[0190] In one embodiment, said IL-6 related disorder is selected from the group consisting of inflammatory diseases, autoimmune diseases, infectious disease, cancer, diabetes, neurological disease and depression, such as the group consisting of inflammatory diseases and autoimmune diseases. In one particular embodiment of said aspect, the IL-6 related disorder is selected from the group consisting of rheumatoid arthritis (RA), juvenile RA, juvenile idiopathic arthritis or systemic juvenile idiopathic arthritis, vasculitis, psoriatic arthritis, psoriasis, ankylosing spondylitis, chronic inflammatory bowel disease such as Crohn's disease and ulcerative colitis; Grave's disease, Behcet's disease, uveitis, giant cell arteritis, multiple sclerosis (MS), systemic sclerosis, systemic lupus erythematosus (SLE), polymyositis, polymyalgia rheumatic, asthma, chronic obstructive pulmonary disease (COPD), relapsing polychondritis, pancreatitis, peritonitis, nephritis, Kawasaki's disease, Sjögren's syndrome and adult Still's disease. In another embodiment, said IL-6 related disorder is cancer, such as a cancer selected from the group consisting of colitis associated cancer, renal cancer, kidney cancer, prostate cancer, malignant lymphoma, multiple myeloma, Castleman's disease, breast cancer and lung cancer. In another embodiment, said IL-6 related disorder is selected from the group consisting of Alzheimer's disease, HIV, diabetes, sepsis, cachexia, myelodysplastic syndrome (MDS), liver cirrhosis, graft versus host disease, myocardial infarction, endometriosis and osteoporosis.

[0191] It may be beneficial to administer a therapeutically effective amount of an IL-6 binding polypeptide, fusion protein or conjugate or composition as described herein and at least one second drug substance, such as an immune response modulating agent as described above or an anti-cancer agent.

[0192] As used herein, the term “co-administration” encompasses both concomitant and sequential administration. Thus, in one embodiment there is provided a method as defined above further comprising co-administration of an immune response modulating agent as described above. In another embodiment there is provided a method as defined above further comprising co-administration of an anti-cancer agent as described above.

[0193] In another aspect of the present disclosure, there is provided a method of detecting IL-6, comprising providing a sample suspected to contain IL-6, contacting said sample with an IL-6 binding polypeptide, fusion protein, conjugate or a composition as described herein, and detecting the binding of the IL-6 binding polypeptide, fusion protein, conjugate or composition to indicate the presence of IL-6 in the sample. In one embodiment, said method further comprises an intermediate washing step for removing non-bound polypeptide, fusion protein, conjugate or composition, after contacting the sample.

[0194] In one embodiment, said method is a diagnostic or prognostic method for determining the presence of IL-6 in a subject, the method comprising the steps:
[0195] contacting the subject, or a sample isolated from the subject, with an IL-6 binding polypeptide, fusion protein, conjugate or a composition as described herein, and
[0196] obtaining a value corresponding to the amount of the IL-6 binding polypeptide, fusion protein, conjugate or composition that has bound in said subject or to said sample.

[0197] In one embodiment, said method further comprises an intermediate washing step for removing non-bound polypeptide, fusion protein, conjugate or composition, after contacting the subject or sample and before obtaining a value.

[0198] In one embodiment, said method further comprises a step of comparing said value to a reference. Said reference may be by a numerical value, a threshold or a visual indicator, for example based on a color reaction. The skilled person will appreciate that different ways of comparison to a reference are known in the art and may be suitable for use.

[0199] In one embodiment of such a method, said subject is a mammalian subject, such as a human subject.

[0200] In one embodiment, said method is performed in vivo. In another embodiment, said method is performed in vitro.

[0201] While the invention has been described with reference to various exemplary aspects and embodiments, it will be understood by those skilled in the art that various changes may be made and equivalents may be substituted for elements thereof without departing from the scope of the invention. In addition, many modifications may be made to adapt a particular situation or molecule to the teachings of the invention without departing from the essential scope thereof. Therefore, it is intended that the invention not be limited to any particular embodiment contemplated, but that the invention will include all embodiments falling within the scope of the appended claims.

### BRIEF DESCRIPTION OF THE FIGURES

[0202] FIG. 1 is a listing of amino acid sequences of examples of IL-6 binding polypeptides of the present disclosure (SEQ ID NO:1-1551), control polypeptides (SEQ ID NO:1552-1553), the albumin binding domain (ABD) variant PP013 (SEQ ID NO:1554) as well as the amino acid sequences of human IL-6 (SEQ ID NO:1555) and murine IL-6 (SEQ ID NO:1556) used for selection, screening and/or characterization for illustration of the invention. In the IL-6 binding polypeptides of the present disclosure, the deduced IL-6 binding motifs (BM) extend from position 8 to position 36 in each sequence. The amino acid sequences of the 49 amino acid residues long polypeptides predicted to constitute the complete three-helix bundle within each of these Z variants extend from position 7 to position 55 (referred herein to as BMod).

[0203] FIG. 2 shows the result of blocking of the interaction between hIL-6 and hIL-6Rα, assayed as described in Example 2. In contrast to the hIL-6Rα binding antibody tocilizumab (black), which was included for comparison, the tested IL-6 binding Z variants (gray) did not interfere with the binding of hIL-6 to its receptor hIL-6Rα.

[0204] FIG. 3 shows the result of blocking of the binding of the hIL-6/hIL-6Rα complex to hgp130, assayed as described in Example 2. Concentration dependent blocking was seen for all tested primary IL-6 binding Z variants (gray) as well as for tocilizumab (black), which was included for comparison. The calculated IC50 value of each variant is shown in Table 3.

[0205] FIG. 4 shows concentration dependent inhibition of IL-6 mediated trans-signaling in a gp130 expressing human umbilical vein endothelial cell (HUVEC) based system, assayed as described in Example 2. IL-6 binding Z variants C-terminally fused to the ABD variant PP013 (SEQ ID NO:1554) inhibited the trans-signaling, whereas the control Z variant Z03638 (SEQ ID NO:1552) in fusion with PP013 did not. Tocilizumab was included for comparison.

[0206] FIG. 5 shows the result of blocking of the binding of the hIL-6/hIL-6Rα complex to hgp130, assayed as described in Example 7. Concentration dependent blocking was seen for all tested maturated IL-6 binding Z variants (gray) as well as for tocilizumab (black) and the primary binder Z06814 (SEQ ID NO:1512; broken line), which were both included for comparison. All maturated IL-6 binding Z variants showed more efficient blocking than the primary binders assayed in Example 2 (compare FIG. 3).

[0207] FIG. 6 shows the result of the TF-1 cell neutralizing assay described in Example 7. Concentration dependent inhibition of IL-6 induced TF-1 cell proliferation was seen for all tested IL-6 binding Z variants (matured Z variants shown in black; primary binder Z06814 (SEQ ID NO:1512) shown as grey filled triangles) and for tocilizumab (grey filled squares), but not for the negative control antibody hIgG (grey filled circles).

[0208] FIG. 7 shows the in vivo efficacy of the Z variant Z06814 (SEQ ID NO:1512) in fusion with the ABD variant PP013 (SEQ ID NO:1554) as scored by assaying IL-6 triggered serum amyloid-A (SAA) protein release in an anti-arthritic mouse model as described in Example 8. Four groups of mice were given 0 (filled squares), 0.025 (open dots), 2.5 (open triangles) or 25 (closed triangles) mg/kg body weight of the IL-6 binding Z06814-ABD fusion protein. As a control, mice were given 25 mg/kg of a control Z variant (Z04726; SEQ ID NO:1553) in fusion with ABD (referred to as Z_{control}-ABD) (open squares). Mice were injected with hIL-6 and subsequently the levels of SAA protein were measured. Two additional control groups of mice received PBS (filled circles) and 25 mg/kg Z06814-ABD (crosses), respectively, but no subsequent IL-6 injection.

### EXAMPLES

### Summary

[0209] The following Examples disclose the development of novel Z variant molecules targeting interleukin 6 (IL-6). The Z variants were obtained using phage display technology. The genes encoding IL-6 binding polypeptides described herein were sequenced, and the corresponding amino acid sequences are listed in FIG. 1 and denoted by the identifiers SEQ ID NO:1-1551.

### Example 1

### Selection and ELISA Screening of IL-6 Binding Z Variants

[0210] In this Example, human (hIL-6) and murine IL-6 (mIL-6) were used as target proteins in phage display selections using a phage library of Z variants. The DNA of selected clones was sequenced and the clones were produced in E. coli periplasmic fractions and assayed against IL-6 in ELISA (enzyme-linked immunosorbent assay).

### Materials and Methods

[0211] Biotinylation of the target proteins human and murine IL-6: hIL-6 and mIL-6 (Peprotech, cat. no. 200-06 and 216-16, respectively) were biotinylated using No-Weigh EZ-Link Sulfo-NHS-LC-Biotin (Thermo Scientific, cat. no. 21327) at a 12× molar excess according to the manufacturer's recommendations. The reactions were performed at room temperature (RT) for 30 min. Next, buffer exchange to phosphate buffered saline (PBS, 10 mM phosphate, 137 mM NaCl, 2.68 mM KCl, pH 7.4) was performed using Slide-a-lyzer dialysis cassettes (Thermo Scientific, cat. no. 66333, 3,500 MWCO) according to the manufacturer's instructions.

[0212] Phage display selection of IL-6 binding Z variants: A library of random variants of protein Z displayed on bacteriophage, constructed in phagemid pAY02592 essentially as described in Grönwall et al. (2007) J Biotechnol, 128:162-183, was used to select IL-6 binding Z variants. In this library, an albumin binding domain (abbreviated ABD and corresponding to GA3 of protein G from Streptococcus strain G148) was used as fusion partner to the Z variants. The library is denoted Zlib006Naive.II and has a size of 1.5×10¹⁰ library members (Z variants). E. coli RRIΔM15 cells (Rüther et al., (1982) Nucleic Acids Res 10:5765-5772) from a glycerol stock containing the phagemid library Zlib006Naive.II were inoculated in 20 l of a defined proline free medium [7 g/l dipotassium hydrogenphosphate, 1 g/l trisodium citrate dihydrate, 0.02 g/l uracil, 6.7 g/l YNB (Difco™ Yeast Nitrogen Base w/o amino acids, Becton Dickinson), 5.5 g/l glucose monohydrate, 0.3 g/l L-alanine, 0.24 g/l L-arginine monohydrochloride, 0.11 g/l L-asparagine monohydrate, 0.1 g/l L-cysteine, 0.3 g/l L-glutamic acid, 0.1 g/l L-glutamine, 0.2 g/l glycine, 0.05 g/l L-histidine, 0.1 g/l L-isoleucine, 0.1 g/l L-leucine, 0.25 g/l L-lysine monohydrochloride, 0.1 g/l L-methionine, 0.2 g/l L-phenylalanine, 0.3 g/l L-serine, 0.2 g/l L-threonine, 0.1 g/l L-tryptophane, 0.05 g/l L-tyrosine, 0.1 g/l L-valine], supplemented with 100 μg/ml ampicillin. The cultivations were grown at 37° C. in a fermenter (Belach Bioteknik, BR20). When the cells reached an optical density at 600 nm (OD₆₀₀) of 0.75, approximately 2.6 I of the cultivation was infected using a 10× molar excess of M13K07 helper phage (New England Biolabs, cat. no. NO315S). The cells were incubated for 30 min, whereupon the fermenter was filled up to 20 l with TSB-YE (Tryptic Soy Broth-Yeast Extract; 30 g/l TSB, 5 g/l yeast extract) supplemented with 100 μM isopropyl-β-D-1-thiogalactopyranoside (IPTG) for induction of expression and with 25 μg/ml kanamycin and 12.5 μg/ml carbenicillin. Cells were grown at 30° C. for 22 h and the cells in the cultivation were pelleted by centrifugation at 15,900 g. Phage particles were precipitated from the supernatant twice in PEG/NaCl (polyethylene glycol/sodium chloride), filtered and dissolved in PBS and glycerol as described in Grönwall et al., supra. Phage stocks were stored at −80° C. before use. Selection procedure and phage stock preparation were performed essentially as described for selection against another biotinylated target in WO2009/077175. In order to reduce the amount of background binders, pre-selection was performed by incubation of phage stock with SA-beads for 30 min at RT. All tubes and beads used in the selection were pre-blocked with PBS supplemented with 5% BSA. Selection was performed in PBS supplemented with 3% BSA and 0.1% Tween20 during 2 h at RT, followed by capture of target-phage complexes on Dynabeads® M-280 Streptavidin (SA-beads, Invitrogen, cat. no. 11206D) using 1 mg beads per 1.6 μg biotinylated hIL-6 or mIL-6. E. coli strain XL1-Blue (Agilent technologies, cat. no. 200268) was used for phage amplification.

[0213] Selections against biotinylated hIL-6 and mIL-6 were performed in four cycles divided in four different final tracks: track (1) in cycle 1 was divided either in the second cycle or the fourth cycle, resulting in totally three tracks (1-1 to 1-3) in cycle 2, three tracks (1-1-1 to 1-3-1) in cycle 3 and four tracks (1-1-1-1 to 1-3-1-2) in cycle 4. After washes, bound phage were eluted from the selection tracks using 500 μl 0.1 M glycine-HCl, pH 2.2, followed by immediate neutralization with 50 μl 1 M Tris-HCl, pH 8.0, and 450 μl PBS. An overview of the selection strategy and parameters used, describing the differences in the selection tracks in terms of lowered target concentration and increased number of washes, is shown in Table 2.

TABLE 2
Overview of the strategy for primary selection

| | | Phage stock | | Target | |
|---|---|---|---|---|---|
| | | from library | | concen- | Number |
| | Selection | or selection | | tration | of |
| Cycle | track | track | Target | (nM) | washes |
| 1 | 1 | Zlib006Naive.II | hIL-6 | 100 | 2 |
| 2 | 1-1 | 1 | hIL-6 | 50 | 5 |
| 2 | 1-2 | 1 | hIL-6 | 10 | 5 |
| 2 | 1-3 | 1 | mIL-6 | 100 | 4 |
| 3 | 1-1-1 | 1-1 | hIL-6 | 25 | 6 |
| 3 | 1-2-1 | 1-2 | hIL-6 | 2 | 8 |
| 3 | 1-3-1 | 1-3 | hIL-6 | 25 | 6 |
| 4 | 1-1-1-1 | 1-1-1 | hIL-6 | 10 | 8 |
| 4 | 1-2-1-1 | 1-2-1 | hIL-6 | 0.5 | 12 |
| 4 | 1-3-1-1 | 1-3-1 | mIL-6 | 10 | 8 |
| 4 | 1-3-1-2 | 1-3-1 | hIL-6 | 0.5 | 12 |

[0214] Sequencing: PCR fragments were amplified from single colonies using a standard PCR program and the primers AFFI-21 (5′-tgcttccggctcgtatgttgtgtg; SEQ ID NO:1557) and AFFI-22 (5′-cggaaccagagccaccaccgg; SEQ ID NO:1558). Sequencing of amplified fragments was performed using the biotinylated oligonucleotide AFFI-72 (5′-biotin-cggaaccagagccaccaccgg; SEQ ID NO:1559) and a BigDye® Terminator v3.1 Cycle Sequencing Kit (Applied Biosystems), used in accordance with the manufacturer's recommendations. The sequencing reactions were purified by binding to magnetic streptavidin coated beads (Detach Streptavidin Beads, Nordiag, cat. no. 2012-01) using a Magnatrix 8000 (Magnetic Biosolution) instrument and analyzed on an ABI PRISM® 3130xl Genetic Analyzer (PE Applied Biosystems).

[0215] Production of Z variants for ELISA: Sequenced Z variants were produced by inoculating single colonies from the selections in 1 ml TSB-YE medium supplemented with 100 μg/ml ampicillin and 0.1 mM IPTG in deep-well plates (Nunc, cat. no. 278752). The plates were incubated for 24 h at 37° C. Cells were pelleted by centrifugation, re-suspended in 200 μl PBST 0.05% (PBS supplemented with 0.05% Tween-20), frozen at −80° C. and thawed in a water bath to release the periplasmic fraction of the cells. The freeze-thawing procedure was repeated five times. The samples were diluted with PBST 0.05% to a total of 800 μl and cells were pelleted by centrifugation. The supernatant of the periplasmic extract contained the Z variants as fusions to ABD, expressed as AQHDEALE-[Z#####]-VDYV-[ABD]-YVPG (Grönwall et al., supra). Z##### refers to individual, 58 amino acid residue Z variants.

[0216] ELISA analysis of Z variants: The binding of Z variants to IL-6 was analyzed in an ELISA assay. Half-area 96-well ELISA plates (Costar, cat. no. 3690) were coated at 4° C. overnight with 2 μg/ml of an anti-ABD goat antibody (produced in-house) diluted in coating buffer (50 mM sodium carbonate, pH 9.6; Sigma, cat. no. C3041). The antibody solution was poured off and the wells were blocked with 100 μl of PBSC (PBS supplemented with 0.5% casein; Sigma, cat. no. C8654) for 1.5 h at RT. The blocking solution was discarded and 50 μl periplasmic solution was added to the wells and incubated for 1.5 h at RT under slow shaking. The supernatants were poured off and the wells were washed 4 times with PBST 0.05%. Next, 50 μl of biotinylated hIL-6 at a concentration of 7.7 nM in PBSC was added to each well. The plates were incubated for 1.5 h at RT followed by washes as described above. Streptavidin conjugated HRP (Thermo Scientific, cat. no. N100) was diluted 1:30 000 in PBSC and added to the wells followed by 45 min incubation. After washing as described above, 50 μl ImmunoPure TMB substrate (Thermo Scientific, cat. no. 34021) was added to the wells and the plates were treated according to the manufacturer's recommendations. A Z variant binding a specific irrelevant protein was used as a positive control by assaying against that specific irrelevant protein, and as a negative control by assaying against hIL-6. As blank control, PBST 0.05% was added instead of the periplasmic sample. Absorbance was measured at 450 nm using a multi-well plate reader (Victor³, Perkin Elmer).

### Results

[0217] Phage display selection of IL-6 binding Z variants: Individual clones were prepared after four cycles of phage display selections against biotinylated hIL-6 and mIL-6.

[0218] Sequencing: Sequencing was performed for clones picked at random from selection round four. Each Z variant was given a unique identification number #####, and individual variants are referred to as Z#####. The amino acid sequences of 58 residues long Z variants are listed in FIG. 1 and in the sequence listing as SEQ ID NO:1503-1551. The deduced IL-6 binding motifs (BM) extend from position 8 to position 36 in each sequence. The amino acid sequences of the 49 amino acid residues long polypeptides predicted to constitute the complete three-helix bundle within each of these Z variants (BMod) extend from position 7 to position 55.

[0219] ELISA analysis of Z variants: The clones obtained after four cycles of selection were produced in 96-well plates and screened for hIL-6 binding activity in ELISA. All clones giving a response with signals corresponding to at least 3× the negative control were considered as positive IL-6 binders. The control molecule specific for an irrelevant protein gave a positive signal for the specific protein, whereas no signal was obtained against hIL-6.

### Example 2

### Production and In Vitro Characterization of IL-6 Binding Z Variants

[0220] In this Example, a subset of Z variants were subcloned, produced and functionally assessed in competition ELISAs and cell assays. Two different

[0221] ELISA assays were applied to investigate if the IL-6 binding Z variants were able to block the specific interaction between IL-6 and IL-6Rα or between IL-6 and the gp130 receptor, respectively. The potency of the Z variant polypeptides was assessed using two different cell assays, mimicking the classical cis-signaling pathway and trans-signaling pathway, respectively. Finally, circular dichroism (CD) spectroscopy was performed for a subset of the Z variants in order to investigate their secondary structure and determine their melting temperatures, Tm.

### Materials and Methods

[0222] Subcloning of Z variants: The DNA of 13 IL-6 binding Z variants, Z06777 (SEQ ID NO:1503), Z06779 (SEQ ID NO:1504), Z06789 (SEQ ID NO:1505), Z06791 (SEQ ID NO:1506), Z06792 (SEQ ID NO:1507), Z06799 (SEQ ID NO:1508), Z06802 (SEQ ID NO:1509), Z06805 (SEQ ID NO:1510), Z06809 (SEQ ID NO:1511), Z06814 (SEQ ID NO:1512), Z06829 (SEQ ID NO:1513), Z06834 (SEQ ID NO:1514), Z06844 (SEQ ID NO:1515) was amplified from the library vector pAY02592. A subcloning strategy for construction of monomeric Z variant molecules with an N-terminal His₆ tag was applied using standard molecular biology techniques (essentially as described in WO2009/077175 for Z variants binding another target). The Z gene fragments were subcloned into the expression vector pAY01448 resulting in the encoded sequence MGSSHHHHHHLQ-[Z#####]-VD.

[0223] A subset of five IL-6 binding Z variants, Z06789, Z06799, Z06809, Z06814 and Z06829, and two control Z variants binding an irrelevant target, Z03638 (SEQ ID NO:1552) and Z04726 (SEQ ID NO:1553), were subcloned in fusion with the ABD variant PP013 (SEQ ID NO:1554). The constructs encoded by the expression vectors were MGSSLQ-[Z#####]-VDGS-PP013.

[0224] Cultivation and purification: E. coli BL21(DE3) cells (Novagen) were transformed with plasmids containing the gene fragment of each respective IL-6 binding Z variant and cultivated at 37° C. in 800 or 1000 ml of TSB-YE medium supplemented with 50 μg/ml kanamycin. In order to induce protein expression, IPTG was added to a final concentration of 0.2 mM at OD₆₀₀=2 and the cultivation was incubated at 37° C. for another 5 h. The cells were harvested by centrifugation.

[0225] Purification of IL-6 binding Z variants with a His₆-tag: Protein purification was performed under either native or denatured conditions.

[0226] The purification under native conditions was performed as follows:

[0227] Approximately 2-5 g of each cell pellet was resuspended in 10 ml PBS. After cell disruption by sonication, cell debris was removed by centrifugation and each supernatant was applied on 2 ml Talon cobolt columns (Clontech, cat. no. 635504) equilibrated with 20 ml wash buffer (46.6 mM Na₂HPO₄, 3.4 mM NaH₂PO₄, and 300 mM NaCl, pH 7.0). Contaminants were removed by washing with wash buffer, and the IL-6 binding Z variants were subsequently eluted with elution buffer (50 mM NaH₂PO₄, 100 mM NaCl, 30 mM HAc and 70 mM NaAc, pH 5.0).

[0228] The purification under denatured conditions was performed as follows: Approximately 2-5 g of each cell pellet was resuspended in 10 ml lysis buffer (7 M guanidinium hydrochloride, 47 mM Na₂HPO₄, 2.65 mM NaH₂PO₄, 10 mM Tris-HCl, 104 mM NaCl, pH 8.0) followed by incubation at 37° C., 150 rpm for 2 h. The washing and elution steps were performed as for the native purification but using different buffers (wash buffer: 6 M guanidinium hydrochloride, 47 mM Na₂HPO₄, 3.4 mM NaH₂PO₄, 300 mM NaCl, pH 8.0; elution buffer: 6 M urea, 0.1 M NaCl, 29.6 mM HAc, 70.4 mM NaAc and 50 mM NaH₂PO₄, pH 5.0). Purified Z variants were buffer exchanged to PBS using PD-10 columns (GE Healthcare) according to the manufacturer's protocol.

[0229] Protein concentrations were determined by measuring the absorbance at 280 nm using the extinction coefficient of the respective protein. The purity of the IL-6 binding Z variants was analyzed by SDS-PAGE stained with Coomassie Blue.

[0230] Purification of IL-6 binding Z variants in fusion with ABD: Approximately 2.5 g of each cell pellet was re-suspended in 20 ml TST-buffer (25 mM Tris-HCl, 1 mM EDTA, 200 mM NaCl, 0.05% Tween20, pH 8.0) supplemented with Benzonase® (Merck). After cell disruption by sonication and clarification by centrifugation, each supernatant was applied on a gravity flow column with 1 ml anti-ABD agarose (WO2014/064237). After washing with TST-buffer and 5 mM NH₄Ac pH 5.5 buffer, the ABD fused Z variants were eluted with 0.1 M HAc. Buffer exchange to PBS (2.68 mM KCl, 137 mM NaCl, 1.47 mM KH₂PO₄, 8.1 mM Na₂HPO₄, pH 7.4) was performed using PD-10 columns (GE Healthcare). Next, the ABD fused Z variants were purified on 1 ml Detoxi-Gel Endotoxin Removing Columns (Pierce, cat.no. 20344) to ensure low endotoxin content. Protein concentrations were determined by measuring the absorbance at 280 nm, using the extinction coefficient of the respective protein. The purity was analyzed by SDS-PAGE stained with Coomassie Blue and the identity of each purified Z-ABD variant was confirmed using LC/MS analysis.

[0231] Analysis of binding site: A first assay was employed to evaluate the interference of the IL-6 binding Z variants with the interaction between hIL-6 and the human IL-6Rα (hIL-6Rα). In this experiment, half area 96-well ELISA plates were coated with anti-IL-6R capture antibody (R&D Systems) at a concentration of 2 μg/ml. Plates were incubated overnight at 4° C. and then washed twice in tap water. Next, the plates were blocked for 1 h in PBSC, and hIL-6Rα (R&D Systems) was added at a concentration of 250 ng/ml.

[0232] Plates were incubated for 1.5 h at RT and then washed 4 times with 200 μl 0.05% Tween/PBS. In separate plates, serial dilutions (concentration range 500-0.5 nM) of the 13 His₆-tagged Z variant polypeptides were titrated with 2.5 nM of biotinylated hIL-6. The IL-6Rα antibody tocilizumab (Roche) was prepared in the same way and included for comparison. Each pre-mixed complex of Z variant and biotinylated hIL-6 was then transferred to wells containing hIL-6Rα. Plates were incubated for another 1.5 h and then washed four times. A 1:8000 dilution of streptavidin-HRP (Thermo Scientific) was added and the plates were incubated for 1 h. Plates were washed a final four times with 0.05% Tween/PBS and TMB substrate (Thermo Scientific) was added for 15 min before the reaction was stopped with 2 M H₂SO₄. The absorbance was measured at 450 nm using a microplate reader (Victor³, Perkin Elmer).

[0233] A second assay was employed to evaluate the interference of the IL-6 binding Z variants on the interaction between human gp130 (hgp130) and the hIL-6/hIL-6Rα complex. In this experiment, half area 96-well ELISA plates were coated with Fc-fused hgp130 (hgp130-Fc) at a concentration of 4 μg/ml. Plates were incubated overnight at 4° C. and then washed twice in tap water. Next, the plates were blocked for 1 h in PBSC. Plates were incubated for 1.5 h at RT and then washed 4 times with 200 μl 0.05% Tween/PBS. In separate plates, serial dilutions (concentration range 500-0.5 nM) of the 13 His₆-tagged

[0234] Z variant polypeptides were titrated with fixed concentration of hIL-6/hIL-6Rα (0.5 nM and 5 nM, respectively).

[0235] The IL-6Rα binding antibody tocilizumab (Roche) was prepared in the same way and included for comparison. The pre-mixed complex of each Z variant polypeptide and hIL-6/hIL-6Rα was then transferred to wells containing hgp130. Plates were incubated for 1.5 h and then washed 4 times. A biotinylated anti-IL-6Rα antibody (R&D Systems) was added and the plates were incubated for another 1.5 h followed by washing. A 1:8000 dilution of streptavidin-HRP (Thermo Scientific) was added and the plates were incubated for 1 h. Next, plates were washed four times and TMB substrate (Thermo Scientific) was added for 15 min before the reaction was stopped with 2 M H₂SO₄. The absorbance was measured at 450 nm using a microplate reader (Victor³, Perkin Elmer).

[0236] In vitro neutralization assays: A first assay, evaluating the classical signaling pathway, used the TF-1 cell line that proliferates in response to human IL-6, TNF and GM-CSF. TF-1 cells were cultured in RPMI1640 with L-glut (Lonza) supplemented with 10% FCS (Gibco), Pen-Strep (Lonza) and 2 ng/ml rhGM-CSF (R&D Systems). Prior to use, cells were washed twice in RPMI1640 in the absence of rhGM-CSF. Cells were then counted and dispensed into 96 well flat bottomed plates at a density of 4×10⁴ cells per well. In separate plates, serial dilutions of the inhibitory compounds (IL-6 binding Z variants, with a His₆-tag (concentration range 1000-0.1 nM) or in fusion with the ABD variant PP013 (SEQ ID NO:1554; concentration range 200-0.007 nM)), and the IL-6Rα binding antibody tocilizumab (Roche; concentration range 200-0.007 nM) were incubated in the presence of 0.099 nM rhIL-6 (R&D Systems, UK). In addition, the ABD-fused variants were incubated with or without 9 pM rhHSA (Novozymes). The pre-mixed complexes of the Z variant polypeptides and hIL-6 were then transferred to wells containing TF-1 cells which were incubated for 72 h at 37° C. in a humidified 5% CO₂ atmosphere. During the last four hours of incubation 10 μl of CCK-8 (Fluka, Sigma Aldrich) was added per well to determine the number of proliferating cells. The absorbance was measured at 450 nm (Abs450) using a microplate reader (Victor³, Perkin Elmer). The data on cell growth was assessed by non-linear regression to a four-parameter dose-response curve, and the half maximal inhibitory concentration (1050) was determined using GraphPadPrism program. The inhibition of IL-6-dependent proliferation of TF-1 cells by the inhibitory molecules was as Abs450 minus control wells that contained cells but no hIL-6.

[0237] To address the trans-signaling pathway, a second assay was used. Herein, human umbilical vein endothelial cells (HUVECs) were stimulated with hIL-6 and soluble hIL-6Rα and the readout was the production of monocyte chemoattractant protein-1 (MCP-1). HUVECs (Lonza) were grown in EGM-2 bullet kit media (Lonza) and passaged in culture no more than eight times. Cells were grown until 75% confluence before use. Cells were detached using trypsin/EDTA (Lonza), resuspended and washed once in fresh medium. Next, cells were counted and dispensed into 96 well flat bottom plates at a density of 2×10⁴ cellsper well. Cells were cultured overnight at 37° C. in a humidified 5% CO₂ atmosphere. In separate plates, serial dilutions (100-0.0015 nM) of the IL-6 binding Z variants Z06789, Z06799, Z06809, Z06814 and Z06829 in fusion with the ABD variant PP013 (SEQ ID NO:1554), PP013-fused negative control Z03638 (SEQ ID NO:1552) binding a different target, and serial dilutions (200-0.003 nM) of tocilizumab (Roche) were incubated in the presence of recombinant hIL-6 (10 ng/ml; 0.5 nM) and soluble hIL-6Rα at a fixed concentration of 200 ng/ml (5.6 nM) with or without 9 μM rhHSA (Novozymes). The pre-mixed solutions with the test molecules and hIL-6/hIL-6Rα were then transferred to wells containing HUVECs, which were incubated for 24 h at 37° C. in a humidified 5% CO₂ atmosphere. Cell free supernatant was collected after the incubation period and human MCP-1 levels were determined by sandwich ELISA using the MCP-1 Duoset ELISA development system (R&D Systems).

[0238] MCP-1 ELISA: Half area 96-well ELISA plates were coated with anti-MCP-1 capture antibody (R&D Systems) at a concentration of 1 μg/ml. Plates were incubated overnight at 4° C., washed twice in tap water and blocked for 1 h in PBSC. Plates were then washed four times with 4×200 μl 0.05% Tween/PBS before standards and samples were added. Plates were incubated for 2 h at RT and washed before addition of 0.1 μg/ml biotinylated anti-MCP-1 antibody (R&D Systems). Plates were then incubated for another 1.5 h, then washed four times. Next, a 1:8000 dilution of streptavidin-HRP (Thermo Scientific) was added and the plates were incubated for 1 h. The plates were washed a final four times and TMB substrate (Thermo Scientific) was added for 20 min before the reaction was stopped with 2 M H₂SO₄. The absorbance was measured at 450 nm using a microplate reader (Victor³, Perkin Elmer).

[0239] CD analysis: A subset of the purified His₆-tagged Z variants was diluted to 0.5 mg/ml in PBS. For each diluted Z variant, a CD spectrum at 250-195 nm was obtained at 20° C. In addition, a variable temperature measurement (VTM) was performed to determine the melting temperature (Tm). In the VTM, the absorbance was measured at 221 nm while the temperature was raised from 20 to 90° C., with a temperature slope of 5° C./min. The CD measurements were performed on a Jasco J-810 spectropolarimeter (Jasco Scandinavia AB) using a cell with an optical path-length of 1 mm.

### Results

[0240] Cultivation and purification: The 13 IL-6 binding Z variants (SEQ ID NO:1503-1515), constructed with an N-terminal His₆ tag, were produced in E. coli. The amount of IMAC-purified protein from approximately 2-5 g bacterial pellets, determined spectrophotometrically by measuring the absorbance at 280 nm, ranged from approximately 10 mg to 20 mg for the different IL-6 binding Z variants. 2 mg to 12 mg were obtained from approximately 2.5 g bacterial pellet of the five Z variants fused to the ABD variant PP013 (SEQ ID NO:1554). SDS-PAGE analysis of each final protein preparation showed that these predominantly contained the IL-6 binding Z variant. The correct identity and molecular weight of each IL-6 binding Z variant was confirmed by HPLC-MS analysis.

[0241] Analysis of binding site: The ability of the 13 tested IL-6 binding His₆-tagged Z variants to block the interactions between either (i) hIL-6 and hIL-6Rα or (ii) hgp130 and preformed hIL-6/hIL-6Rα complex was investigated in two separate competitive ELISA experiments. None of the 13 Z variants showed any significant effect when tested for blocking of the hIL-6/hIL-6Rα interaction (FIG. 2). However, all Z variants showed a clear concentration-dependent blocking of the interaction between pre-formed hIL-6/hIL-6Rα and hgp130, i.e. the trans-signaling-resembling interaction (FIG. 3). The calculated 1050 value for each Z variant is shown in Table 3. The antibody tocilizumab, included for comparison, showed a blocking effect in both experiments.

TABLE 3
IC50 values for primary Z variants blocking
the hIL-6/hIL-6Rα interaction with hgp130

| | SEQ ID NO of | |
|---|---|---|
| Z variant | Z variant: | IC50 (M) |
| His₆-Z06777 | 1503 | 4.6 × 10⁻⁸ |
| His₆-Z06779 | 1504 | 3.6 × 10⁻⁸ |
| His₆-Z06789 | 1505 | 6.2 × 10⁻⁹ |
| His₆-Z06791 | 1506 | 2.3 × 10⁻⁸ |
| His₆-Z06792 | 1507 | 1.7 × 10⁻⁸ |
| His₆-Z06799 | 1508 | 3.7 × 10⁻⁹ |
| His₆-Z06802 | 1509 | 2.7 × 10⁻⁸ |
| His₆-Z06805 | 1510 | 4.2 × 10⁻⁸ |
| His₆-Z06809 | 1511 | 3.3 × 10⁻⁹ |
| His₆-Z06814 | 1512 | 1.6 × 10⁻⁹ |
| His₆-Z06829 | 1513 | 1.1 × 10⁻⁸ |
| His₆-Z06834 | 1514 | 5.3 × 10⁻⁸ |
| His₆-Z06844 | 1515 | 8.7 × 10⁻⁸ |

[0242] In vitro neutralization assays: Two different cell assays were used for investigating the ability of the IL-6 binding Z variants to block IL-6 dependent signaling in the classical signaling pathway and the trans-signaling pathway, respectively. The first assay, evaluating the classical signaling pathway, employed the TF-1 cell line that proliferates in response to human IL-6, TNF and GM-CSF. The direct signaling of IL-6 to cell surface IL-6 receptor, in conjunction with a signaling receptor sub-unit called gp130, is termed cis-signaling. This assay showed that all 13 variants were capable of blocking IL-6 dependent growth of the TF-1 cells. The calculated 1050 values for His₆-tagged Z variants and Z variants recombinantly fused to the ABD variant PP013 (SEQ ID NO:1554), as well as for the hIL-6Rα binding antibody tocilizumab included for comparison, are shown in Table 4.

TABLE 4
IC50 values for primary Z variants blocking
the IL-6 dependent growth of TF-1 cells

| | SEQ ID NO of | |
|---|---|---|
| Z variant | Z variant: | IC50 (M) |
| His₆-Z06777 | 1503 | 7.2 × 10⁻⁸ |
| His₆-Z06779 | 1504 | 3.0 × 10⁻⁸ |
| His₆-Z06789 | 1505 | 8.6 × 10⁻⁹ |
| His₆-Z06791 | 1506 | 5.2 × 10⁻⁹ |
| His₆-Z06792 | 1507 | 5.3 × 10⁻⁸ |
| His₆-Z06799 | 1508 | 3.9 × 10⁻⁹ |
| His₆-Z06802 | 1509 | 4.3 × 10⁻⁸ |
| His₆-Z06805 | 1510 | 7.7 × 10⁻⁸ |
| His₆-Z06809 | 1511 | 2.0 × 10⁻⁸ |
| His₆-Z06814 | 1512 | 1.6 × 10⁻⁹ |
| His₆-Z06829 | 1513 | 2.8 × 10⁻⁸ |
| His₆-Z06834 | 1514 | 6.1 × 10⁻⁸ |
| His₆-Z06844 | 1515 | 1.1 × 10⁻⁷ |
| Z06789-ABD | 1505 | ~1 × 10⁻⁷ |
| Z06799-ABD | 1508 | 2.4 × 10⁻⁹ |
| Z06809-ABD | 1511 | 1.0 × 10⁻⁸ |
| Z06814-ABD | 1512 | 8.0 × 10⁻¹⁰ |
| Z06829-ABD | 1513 | 1.5 × 10⁻⁸ |
| tocilizumab | | 3.0 × 10⁻¹⁰ |

[0243] To investigate if also the trans-signaling pathway could be blocked in a cell based system, a second assay using gp130 expressing human umbilical vein endothelial cells (HUVECs) was performed. Incubation of HUVECs with preformed hIL-6/hIL-6Rα complexes results in IL-6 trans-signaling dependent secretion of Monocyte Chemoattractant Protein-1 (MCP-1), allowing for analysis of any trans-signaling blocking capabilities of IL-6 binding Z variants. In this assay, five Z variants recombinantly fused to the ABD variant PP013 (SEQ ID NO:1554) were analyzed in the presence of HSA. The hIL-6Rα binding antibody tocilizumab was included for comparison. All five investigated Z variants were shown to inhibit trans-signaling (FIG. 4). One variant, Z06814-ABD, was shown to be more potent than tocilizumab and exhibited an approximate 1050 value of 1 nM compared to 5 nM for tocilizumab.

[0244] CD analysis: The CD spectra determined for seven Z variants showed that each had an a-helical structure at 20° C. The melting temperatures (Tm) determined through variable temperature measurements are shown in Table 5.

TABLE 5
Melting temperatures for a selection of Z variants

| Z variant | SEQ ID NO: | Tm (° C.) |
|---|---|---|
| His₆-Z06779 | 1504 | 51 |
| His₆-Z06789 | 1505 | 52 |
| His₆-Z06792 | 1507 | 48 |
| His₆-Z06799 | 1508 | 44 |
| His₆-Z06809 | 1511 | 51 |
| His₆-Z06814 | 1512 | 49 |
| His₆-Z06829 | 1513 | 40 |

### Example 3

### Design and Construction of a First Maturated Library of IL-6 Binding Z Variants

[0245] In this Example, a maturated library was constructed. The library was used for selections of new IL-6 binding Z variants. Selections from maturated libraries are usually expected to result in binders with increased affinity (Orlova et al., (2006) Cancer Res 66 (8):4339-48). In this study randomized single stranded linkers were generated, using split-pool synthesis, enabling incorporation of defined codons in desired positions in the synthesis.

### Materials and Methods

[0246] Library design: The library was based on a selection of sequences of the IL-6 binding Z variants described in Example 1 and 2. In the new library, 12 variable positions in the Z molecule scaffold were biased towards certain amino acid residues and one position was kept constant, according to a strategy based on the Z variant sequences defined in SEQ ID NO:1503-1551. Using split-pool synthesis, a DNA linker of 147 by was generated, encoding a partially randomized helix 1 and 2 of the Z variant amino acid sequence. Thus, 5′-AA ATA AAT CTC GAG GTA GAT GCC AAA TAC GCC AAA GAA NNN NNN NNN GCG TGG NNN GAG ATC NNN NNN CTG CCT AAC CTC ACC NNN NNN CAA NNN NNN GCC TTC ATC NNN AAA TTA NNN GAT GAC CCA AGC CAG AGC TCA TTA TTT A-3′ (SEQ ID NO:1560; randomized codons denoted NNN) flanked by restriction sites Xhol and Sacl, was ordered from DNA 2.0 (Menlo Park, Calif., USA). The theoretical distributions of amino acid residues in the new library including 12 variable Z positions (9, 10, 11, 14, 17, 18, 24, 25, 27, 28, 32 and 35) in the Z molecule scaffold are given in Table 6. The resulting theoretical library size is 3.6×10⁹ variants.

TABLE 6
Library design, first maturation

| Amino acid | Randomization | No of | |
|---|---|---|---|
| position | (amino acid | amino | |
| in Z | abbreviations) | acids | Proportion |
| 9 | E (70%), H, Q, T, | 4 | 1/10, 7/10 (E) |
| 10 | A, H, Q, R, | 4 | 1/4 |
| 11 | A, D, E, H, K, Q, R, S, T, V | 10 | 1/10 |
| 13 | W | 1 | 1/1 |
| 14 | A, F, H, L, R, S, T, W, Y | 9 | 1/9 |
| 17 | H (70%), Q, S, T | 4 | 1/10, 7/10 (H) |
| 18 | A, H, I, K, L, M, S, T, V | 9 | 1/9 |
| 24 | A, H, I, T, V | 5 | 1/5 |
| 25 | D, E, H, N, Q, R, S, T | 8 | 1/8 |
| 27 | A, H, I, L, M, R, T, V | 8 | 1/8 |
| 28 | A, E, H, S, T, V | 6 | 1/6 |
| 32 | A, H, I, M, Q, S, T, V, W | 9 | 1/9 |
| 35 | F, L, M, Y | 4 | 1/4 |

[0247] Library construction: The library was amplified using AmpliTaq Gold polymerase (Applied Biosystems, cat. no. 4311816) during 12 cycles of PCR and pooled products were purified with QIAquick PCR Purification Kit (QIAGEN, cat. no. 28106) according to the supplier's recommendations. The purified pool of randomized library fragments was digested with restriction enzymes Xhol and Sacl-HF (New England Biolabs, cat. no. R0146L, and cat. no. R3156M) and concentrated using a PCR Purification Kit (Qiagen, cat. no. 28106). Subsequently, the product was run on a preparative 2.5% agarose gel (Nuisieve GTC agarose, Cambrex, Invitrogen) and purified using a QIAGEN gel extraction Kit (QIAGEN, cat. no. 28706) according to the supplier's recommendations.

[0248] The phagemid vector pAY02592 (essentially as pAffi1 described in Grönwall et al, supra) was restricted with the same enzymes and purified using phenol/chloroform extraction and ethanol precipitation. The restricted fragments and vector were ligated in a molar ratio of 5:1 with T4 DNA ligase (Fermentas, cat. no. EL0011) for 2 h at RT, followed by overnight incubation at 4° C. The ligated DNA was recovered by phenol/chloroform extraction and ethanol precipitation, followed by dissolution in 10 mM Tris-HCl, pH 8.5. Thus, the resulting library in vector pAY02592 encoded Z variants, each fused to an albumin binding domain (ABD) derived from streptococcal protein G.

[0249] The ligation reactions (approximately 160 ng DNA/transformation) were electroporated into electrocompetent E. coli ER2738 cells (50 μl, Lucigen, Middleton, Wis., USA). Immediately after electroporation, approximately 1 ml of recovery medium (supplied with the ER2738 cells) was added. The transformed cells were incubated at 37° C. for 60 min. Samples were taken for titration and for determination of the number of transformants. Next, the cells were pooled and cultivated overnight at 37° C. in 1 1 of TSB-YE medium, supplemented with 2% glucose, 10 μg/ml tetracycline and 100 μg/ml ampicillin. The cells were pelleted for 7 min at 4,000 g and resuspended in a PBS/glycerol solution (approximately 40% glycerol), aliquoted and stored at −80° C. Clones from the library of Z variants were sequenced in order to verify the content and to evaluate the outcome of the constructed library vis-à-vis the library design. Sequencing was performed as described in Example 1 and the amino acid distribution was verified.

[0250] Preparation of phage stock: Phage stock containing the phagemid library was prepared in a 20 I fermenter (Belach Bioteknik). Cells from a glycerol stock containing the phagemid library were inoculated in 10 l of TSB-YE (Tryptic Soy Broth-Yeast Extract; 30 g/l TSB, 5 g/l yeast extract) supplemented with 1 g/l glucose, 100 mg/l ampicillin and 10 mg/l tetracycline. When the cells reached an optical density at 600 nm (0D₆₀₀) of 0.64, approximately 1.1 l of the cultivation was infected using a 5× molar excess of M13K07 helper phage. The cells were incubated for 30 min, whereupon the fermenter was filled up to 10 I with complex fermentation medium [2.5 g/l (NH₄)₂SO₄; 5.0 g/l yeast extract; 30 g/l tryptone, 2 g/l K₂HPO₄; 3 g/l KH₂PO₄, 1.25 g/l; Na₃C₆H_{S}O₇.2 H₂O; Breox FMT30 antifoaming agent 0.1 ml/l]. The following components were added: 10 ml carbenicillin 25 mg/ml; 5 ml kanamycin 50 mg/ml; 1 ml 1 M isopropyl-β-D-1-thiogalactopyranoside (IPTG); 17.5 ml/l of 300 g/l MgSO₄ and 5 ml of a trace element solution [35 g/l FeCl₃.6 H₂O; 10.56 g/l ZnSO₄.7 H₂O; 2.64 g/l CuSO₄.5 H₂O; 13.2 g/l MnSO₄.H₂O; 13.84 g/l CaCl₂.2 H₂O, dissolved in 1.2 M HCI]. A glucose limited fed-batch cultivation was started where a 600 g/l glucose solution was fed to the reactor (3.5 g/h in the start, 37.5 g/h after 20 h and until the end of the cultivation). The pH was controlled at pH 7 through the automatic addition of 25% NH₄OH. Air was supplemented (5 1/min) and the stirrer was set at 500 rpm. After 24 h of fed-batch cultivation the OD₆₀₀ was 22. The cells in the cultivation were pelleted by centrifugation at 15,900 g. The phage particles were precipitated twice from the supernatant in PEG/NaCl, filtered and dissolved in PBS and glycerol as described in Example 1. Phage stocks were stored at −80° C. until use in selection.

### Results

[0251] Library construction: The new library was designed based on a set of IL-6 binding Z variants with verified binding properties (Example 1 and 2). The theoretical size of the designed library was 3.6×10⁹ Z variants. The actual size of the library, determined by titration after transformation to E. coli ER2738 cells, was 3.5×10⁹ transformants.

[0252] The library quality was tested by sequencing of 192 transformants and by comparing their actual sequences with the theoretical design. The contents of the actual library compared to the designed library were shown to be satisfactory. A maturated library of potential binders to IL-6 was thus successfully constructed.

### Example 4

### Selection, Screening and Characterization of Z Variants From the First Maturated Library

### Materials and Methods

[0253] Phage display selection of matured IL-6 binding Z variants: The target proteins hIL-6 (R&D Systems, cat. no. 206-IL/CF) and mIL-6 (Abnova, cat. no.

[0254] P4346 116) were biotinylated as described in Example 1. Phage display selections, using the new library of Z variant molecules described in Example 3, were performed in four cycles against hIL-6 and mIL-6 essentially as described in Example 1 with the following exceptions. At selection, fetal calf serum (FCS, Gibco, cat. no.10108-165) and human serum albumin (HSA, Albucult, Novozymes, cat. no. 230-005) were added to the selection buffer to a final concentration of 10% and 1.5 μM, respectively. All tubes and beads used in the selection were pre-blocked with PBST 0.1% supplemented with 3% BSA. In cycle 1A, a pre-selection step was performed by incubation of phage stock with SA-beads. The selection volume was 2 ml in cycle 1 for all tracks. For capture of phage-target complexes, 1 mg beads per 4 μg biotinylated hIL-6 or mIL-6 was used.

[0255] The six tracks (1-6) in cycle 1 were divided either in the second cycle or the third cycle, resulting in totally seven tracks (1-1 to 6-2) in cycle 2, twelve tracks (1-1-1 to 6-2-1) in cycle 3 and twelve tracks (1-1-1-1 to 6-2-1-1) in cycle 4.

[0256] The bound phage particles were eluted using two different procedures;

[0257] 1) 500 μl 0.1 M glycine-HCl, pH 2.2, followed by immediate neutralization with 50 μl 1 M Tris-HCl, pH 8.0, and 450 μl PBS, or 2) 500 μl of 100 mM sodium phosphate and 150 mM sodium chloride, pH 5.5 and neutralization with 500 μl PBS.

[0258] An overview of the selection strategy, describing an increased stringency in subsequent cycles obtained by using a lowered target concentration and an increased number of washes, is shown in Table 7.

TABLE 7
Overview of the selection strategy for the first maturation

| | | Phage | | | | |
|---|---|---|---|---|---|---|
| | | stock | | | | |
| | | from | | | | |
| | | library | | | | |
| | | or | | Target | Number | |
| | Selection | selection | | concentration | of | Elution |
| Cycle | track | track | Target | (nM) | washes | at |
| 1 | 1 | Zlib006IL- | hIL-6 | 50 | 2 | pH 2.2 |
| | | 6.I | | | | |
| 1 | 2 | Zlib006IL- | hIL-6 | 25 | 2 | pH 2.2 |
| | | 6.I | | | | |
| 1 | 3 | Zlib006IL- | hIL-6 | 10 | 3 | pH 2.2 |
| | | 6.I | | | | |
| 1 | 4 | Zlib006IL- | hIL-6 | 50 | 2 | pH 5.45 |
| | | 6.I | | | | |
| 1 | 5 | Zlib006IL- | hIL-6 | 25 | 2 | pH 5.45 |
| | | 6.I | | | | |
| 1 | 6 | Zlib006IL- | mIL-6 | 100 | 2 | pH 2.2 |
| | | 6.I | | | | |
| 2 | 1-1 | 1 | hIL-6 | 25 | 8 | pH 2.2 |
| 2 | 2-1 | 2 | hIL-6 | 10 | 8 | pH 2.2 |
| 2 | 3-1 | 3 | hIL-6 | 2.5 | 12 | pH 2.2 |
| 2 | 4-1 | 4 | hIL-6 | 25 | 8 | pH 5.45 |
| 2 | 5-1 | 5 | hIL-6 | 10 | 8 | pH 5.45 |
| 2 | 6-1 | 6 | mIL-6 | 100 | 4 | pH 2.2 |
| 2 | 6-2 | 6 | mIL-6 | 50 | 6 | pH 2.2 |
| 3 | 1-1-1 | 1-1 | hIL-6 | 5 | 12 | pH 2.2 |
| 3 | 1-1-2 | 1-1 | hIL-6 | 1.25 | 15 | pH 2.2 |
| 3 | 2-1-1 | 2-1 | hIL-6 | 1.25 | 12 | pH 2.2 |
| 3 | 2-1-2 | 2-1 | hIL-6 | 0.5 | 15 | pH 2.2 |
| 3 | 3-1-1 | 3-1 | hIL-6 | 0.5 | 20 | pH 2.2 |
| 3 | 3-1-2 | 3-1 | hIL-6 | 0.05 | 20 | pH 2.2 |
| 3 | 4-1-1 | 4-1 | hIL-6 | 5 | 12 | pH 5.45 |
| 3 | 4-1-2 | 4-1 | hIL-6 | 1.25 | 15 | pH 5.45 |
| 3 | 5-1-1 | 5-1 | hIL-6 | 2.5 | 12 | pH 5.45 |
| 3 | 5-1-2 | 5-1 | hIL-6 | 1 | 15 | pH 5.45 |
| 3 | 6-1-1 | 6-1 | mIL-6 | 50 | 11 | pH 2.2 |
| 3 | 6-2-1 | 6-2 | mIL-6 | 25 | 11 | pH 2.2 |
| 4 | 1-1-1-1 | 1-1-1 | hIL-6 | 0.5 | 16 | pH 2.2 |
| 4 | 1-1-2-1 | 1-1-2 | hIL-6 | 0.05 | 20 | pH 2.2 |
| 4 | 2-1-1-1 | 2-1-1 | hIL-6 | 0.1 | 16 | pH 2.2 |
| 4 | 2-1-2-1 | 2-1-2 | hIL-6 | 0.025 | 20 | pH 2.2 |
| 4 | 3-1-1-1 | 3-1-1 | hIL-6 | 0.025 | 30 | pH 2.2 |
| 4 | 3-1-2-1 | 3-1-2 | hIL-6 | 0.0025 | 30 | pH 2.2 |
| 4 | 4-1-1-1 | 4-1-1 | hIL-6 | 1 | 16 | pH 5.45 |
| 4 | 4-1-2-1 | 4-1-2 | hIL-6 | 0.1 | 20 | pH 5.45 |
| 4 | 5-1-1-1 | 5-1-1 | hIL-6 | 0.2 | 16 | pH 5.45 |
| 4 | 5-1-2-1 | 5-1-2 | hIL-6 | 0.05 | 20 | pH 5.45 |
| 4 | 6-1-1-1 | 6-1-1 | mIL-6 | 10 | 12 | pH 2.2 |
| 4 | 6-2-1-1 | 6-2-1 | mIL-6 | 1 | 16 | pH 2.2 |

[0259] Amplification of phage particles: Amplification of phage particles between selection cycle 1 and 2 was performed essentially as described in Example 1, with the following exceptions. E. coli ER2738 was used for phage amplification and M13K07 helper phage was used in 5 x excess. The amplification of phage particles between the selection cycles 2 and 4 was done by infection of bacteria in solution according to the following. After infection of log phase E. coli ER2738 with phage particles, TSB supplemented with 2% glucose, 10 μg/ml tetracycline and 100 μg/ml ampicillin was added, followed by incubation with rotation for 30 min at 37° C. Thereafter, the bacteria were infected with M13K07 helper phage. The infected bacteria were pelleted by centrifugation, re-suspended in TSB-YE medium supplemented with 100 μM IPTG, 25 μg/ml kanamycin and 100 μg/ml ampicillin, and grown overnight at 30° C. The overnight cultures were centrifuged and phage particles in the supernatant were precipitated twice with PEG/NaCl buffer. Finally, the phage particles were re-suspended in selection buffer before entering the next selection cycle. In the last selection cycle, log phase bacteria were infected with eluate and diluted before spreading onto TBAB plates (30 g/l tryptose blood agar base, Oxoid cat. no. CMO233B) supplemented with 0.2 g/l ampicillin in order to form single colonies for use in ELISA screening.

[0260] Sequencing of potential binders: Individual clones from the different selection tracks were picked for sequencing. All clones run in the ELISA screening were sequenced. Amplification of gene fragments and sequence analysis of gene fragments were performed essentially as described in Example 1.

[0261] ELISA screening of Z variants: Single colonies containing Z variants (expressed as Z variant ABD fusion proteins) were randomly picked from the selected clones of the IL-6 maturated library and cultivated as described in Example 1. Preparation of the periplasmic supernatants was performed as in Example 1 but with six freeze thawing cycles. ELISA screenings were performed essentially as described in Example 1 using biotinylated hIL-6 at a concentration of 0.58 nM. The periplasmic fraction of the primary IL-6 binder Z06814 was used as a positive control. A negative control was created by using periplasm containing ABD only.

[0262] ELISA EC50 analysis of human IL-6 binders: A selection of IL-6 binders was subjected to an analysis of the response against a dilution series of biotinylated hIL-6 using ELISA as described above. Biotinylated protein was added at a concentration of 25 nM and diluted stepwise 1:3 down to 11 pM. All Z variants were also assayed without added target protein as a background control. Periplasm samples containing the primary IL-6 binder Z06814 (SEQ ID.NO:1512) were included and analyzed as a positive control. As a negative control, periplasm containing ABD only was assayed against biotinylated hIL-6. Two binders originating from the selection against mIL-6, Z11612 (SEQ ID NO:151) and Z11616 (SEQ ID NO:152) were subjected to an analysis of the response against a dilution series of biotinylated mIL-6 using ELISA as described above. Biotinylated protein was added at a concentration of 227 nM and diluted stepwise 1:3 down to 104 pM. Obtained values were analyzed using GraphPad Prism 5 and non-linear regression.

### Results

[0263] Phage display selection of maturated IL-6 binding Z variants: Selection was performed in totally 12 parallel tracks containing four cycles each. The different selection tracks differed in target concentration, target type (hIL-6 or mIL-6), selection time, wash conditions and the pH of the elution buffer.

[0264] Sequencing: Randomly picked clones were sequenced. Each individual Z variant was given an identification number, Z#####, as described in Example 1. In total, 809 new unique Z variant molecules were identified.

[0265] The amino acid sequences of 58 residues long Z variants are listed in FIG. 1 and in the sequence listing as SEQ ID NO:7, SEQ ID NO:15-89 and SEQ ID NO:151-871.The deduced IL-6 binding motifs (BM) extend from position 8 to position 36 in each sequence. The amino acid sequences of the 49 amino acid residues long polypeptides predicted to constitute the complete three-helix bundle within each of these Z variants (BMod) extend from position 7 to position 55.

[0266] ELISA screening of Z variants: Clones obtained after four selection cycles were produced in 96-well plates and screened for hIL-6 binding activity using ELISA. All randomly picked clones were analyzed. 796 of the 809 unique Z variants were found to give a response of 3× the negative control or higher (0.3-2.1 AU) against hIL-6 at a concentration of 0.58 nM. Clones from all selection tracks using hIL-6 as selection target showed positive signals. The negative controls had absorbencies of 0.078-0.102 AU. The average response of the blank controls of a representative set of plates was 0.087 AU.

[0267] ELISA EC50 analysis of IL-6 binders: A subset of Z variants was selected based on the result in the ELISA experiment described above (highest ELISA value normalized against the positive control on each plate, respectively) and subjected to a target titration in ELISA format. Periplasm samples were incubated with a serial dilution of biotinylated hIL-6 or mIL-6. A periplasm sample with the primary binder Z06814 (SEQ ID NO:1512) was also assayed against hIL-6 as a positive control. Obtained values were analyzed and their respective EC50 values were calculated (Tables 8 and 9).

TABLE 8
Calculated EC50 values against hIL-6

| Z variant | SEQ ID NO | EC50 ELISA (M) |
|---|---|---|
| Z11213 | 15 | 1.5 × 10⁻¹⁰ |
| Z11214 | 16 | 1.3 × 10⁻¹⁰ |
| Z11215 | 17 | 1.4 × 10⁻¹⁰ |
| Z11217 | 18 | 1.3 × 10⁻¹⁰ |
| Z11222 | 19 | 1.4 × 10⁻¹⁰ |
| Z11251 | 20 | 1.4 × 10⁻¹⁰ |
| Z11277 | 21 | 1.2 × 10⁻¹⁰ |
| Z11278 | 22 | 1.5 × 10⁻¹⁰ |
| Z11283 | 23 | 1.8 × 10⁻¹⁰ |
| Z11300 | 24 | 1.9 × 10⁻¹⁰ |
| Z11321 | 25 | 1.4 × 10⁻¹⁰ |
| Z11329 | 26 | 1.4 × 10⁻¹⁰ |
| Z11351 | 27 | 1.7 × 10⁻¹⁰ |
| Z11380 | 28 | 1.7 × 10⁻¹⁰ |
| Z11384 | 29 | 1.5 × 10⁻¹⁰ |
| Z11433 | 30 | 2.1 × 10⁻¹⁰ |
| Z11472 | 31 | 1.8 × 10⁻¹⁰ |
| Z11552 | 32 | 1.2 × 10⁻⁹ |
| Z11632 | 7 | 1.9 × 10⁻¹⁰ |
| Z11642 | 33 | 2.3 × 10⁻¹⁰ |
| Z11644 | 34 | 2.4 × 10⁻¹⁰ |
| Z11674 | 35 | 2.6 × 10⁻¹⁰ |
| Z11698 | 36 | 2.0 × 10⁻¹⁰ |
| Z11711 | 37 | 3.5 × 10⁻¹⁰ |
| Z11723 | 38 | 2.5 × 10⁻¹⁰ |
| Z11781 | 39 | 2.9 × 10⁻¹⁰ |
| Z11784 | 40 | 2.7 × 10⁻¹⁰ |
| Z11788 | 41 | 2.5 × 10⁻¹⁰ |
| Z11789 | 42 | 2.4 × 10⁻¹⁰ |
| Z11791 | 43 | 3.4 × 10⁻¹⁰ |
| Z11794 | 44 | 2.2 × 10⁻¹⁰ |
| Z11802 | 45 | 2.6 × 10⁻¹⁰ |
| Z11803 | 46 | 2.8 × 10⁻¹⁰ |
| Z11805 | 47 | 3.4 × 10⁻¹⁰ |
| Z11814 | 48 | 2.5 × 10⁻¹⁰ |
| Z11815 | 49 | 2.8 × 10⁻¹⁰ |
| Z11817 | 50 | 2.5 × 10⁻¹⁰ |
| Z11818 | 51 | 2.4 × 10⁻¹⁰ |
| Z11819 | 52 | 2.5 × 10⁻¹⁰ |
| Z11823 | 53 | 2.1 × 10⁻¹⁰ |
| Z11824 | 54 | 2.3 × 10⁻¹⁰ |
| Z11833 | 55 | 2.9 × 10⁻¹⁰ |
| Z11835 | 56 | 2.9 × 10⁻¹⁰ |
| Z11836 | 57 | 3.6 × 10⁻¹⁰ |
| Z11860 | 58 | 1.8 × 10⁻¹⁰ |
| Z11861 | 59 | 2.2 × 10⁻¹⁰ |
| Z11862 | 60 | 1.9 × 10⁻¹⁰ |
| Z11865 | 61 | 2.3 × 10⁻¹⁰ |
| Z11866 | 62 | 2.5 × 10⁻¹⁰ |
| Z11871 | 63 | 1.7 × 10⁻¹⁰ |
| Z11872 | 64 | 2.8 × 10⁻¹⁰ |
| Z11874 | 65 | 3.1 × 10⁻¹⁰ |
| Z11875 | 66 | 2.1 × 10⁻¹⁰ |
| Z11881 | 67 | 1.7 × 10⁻¹⁰ |
| Z11882 | 68 | 1.4 × 10⁻¹⁰ |
| Z11883 | 69 | 2.1 × 10⁻¹⁰ |
| Z11890 | 70 | 1.9 × 10⁻¹⁰ |
| Z11892 | 71 | 2.3 × 10⁻¹⁰ |
| Z11893 | 72 | 2.0 × 10⁻¹⁰ |
| Z11895 | 73 | 2.8 × 10⁻¹⁰ |
| Z11896 | 74 | 2.9 × 10⁻¹⁰ |
| Z11897 | 75 | 3.0 × 10⁻¹⁰ |
| Z11901 | 76 | 1.7 × 10⁻¹⁰ |
| Z11903 | 77 | 2.3 × 10⁻¹⁰ |
| Z11904 | 78 | 2.4 × 10⁻¹⁰ |
| Z11905 | 79 | 3.1 × 10⁻¹⁰ |
| Z11906 | 80 | 2.5 × 10⁻¹⁰ |
| Z11907 | 81 | 3.6 × 10⁻¹⁰ |
| Z11912 | 82 | 1.8 × 10⁻¹⁰ |
| Z11918 | 83 | 3.2 × 10⁻¹⁰ |
| Z11922 | 84 | 2.7 × 10⁻¹⁰ |
| Z11923 | 85 | 2.1 × 10⁻¹⁰ |
| Z11929 | 86 | 2.6 × 10⁻¹⁰ |
| Z11933 | 87 | 1.6 × 10⁻¹⁰ |
| Z11937 | 88 | 3.0 × 10⁻¹⁰ |
| Z11939 | 89 | 2.1 × 10⁻¹⁰ |
| Z06814 | 1512 | 2.9 × 10⁻¹⁰ |

TABLE 9
Calculated EC50 values against mIL-6

| Z variant | SEQ ID NO | EC50 ELISA (M) |
|---|---|---|
| Z11612 | 151 | 9.3 × 10⁻⁹ |
| Z11616 | 152 | 7.7 × 10⁻⁹ |

### Example 5

[0268] Design and construction of a second maturated library of IL-6 binding Z variants

[0269] In this Example, a second maturated library was constructed essentially as described in Example 4. The library was used for selections of IL-6 binding Z variants.

### Materials and Methods

[0270] Library design: The library was primarily based on a selection of sequences of the human IL-6 binding Z variants described in Example 4. In the new library, 13 variable positions in the Z molecule scaffold were biased towards certain amino acid residues, according to a strategy mainly based on the Z variants from the first maturation, i.e. sequences defined in SEQ ID NO:7, SEQ ID NO:15-89 and SEQ ID NO:151-871. Randomized double stranded linkers were generated by the Colibra™ technology, which enables incorporation of randomized sets of trinucleotide building blocks using ligations and restrictions of the subsequently built up double stranded DNA. A library of double-stranded DNA, 5′-AA ATA AAT CTC GAG GTA GAT GCC AAA TAC GCC AAA GAA NNN NNN NNN GCT NNN NNN GAG ATC NNN NNN CTG CCG AAC CTG ACC NNN NNN CAG NNN NNN GCC TTC ATC NNN AAA TTA NNN GAT GAO CCA AGC CAG AGC TCA TTA TTT A-3′ (SEQ ID NO:1561; randomized codons are denoted NNN) encoding a partially randomized helix 1 and 2 of the Z variant amino acid sequence, flanked by restriction sites Xhol and Sacl, was ordered from Isogenica (Essex, UK). The theoretical distributions of amino acid residues in the new library, including eight variable amino acid positions (10, 11, 14, 18, 24, 25, 27 and 32) and five constant amino acid positions (9, 13, 17, 28, and 35) in the Z molecule scaffold are given in Table 10. The resulting theoretical library size was 2.6×10⁷ variants.

[0271] Library construction and phage stock preparation: The library was constructed essentially as described in Example 3. Phage stock of the library was prepared as described in Example 3.

TABLE 10
Library design, second maturation

| Amino acid | | No of | |
|---|---|---|---|
| position | | amino | |
| in Z | Allowed amino acids | acids | Proportion |
| 9 | E | 1 | 1/1 |
| 10 | A, D, E, F, H, I, K, L, N, Q, R, | 1 | 1/16 |
| | S, T, V, W, Y | | |
| 11 | A, D, E, F, G, H, I, K, L, M, N, | 17 | 1/18 |
| | Q, R, S, T, V, W, Y | | |
| 13 | W | 1 | 1/1 |
| 14 | A, D, E, F, H, I, K, L, M, N, Q, | 7 | 1/17 |
| | R, S, T, V, W, Y | | |
| 17 | H | 1 | 1/1 |
| 18 | A, D, E, F, G, H, I, K, L, N, Q, | 17 | 1/17 |
| | R, S, T, V, W, Y | | |
| 24 | I, L, V | 1 | 1/3 |
| 25 | A, D, E, F, G, H, I, K, L, N, Q, | 10 | 1/17 |
| | R, S, T, V, W, Y | | |
| 27 | I, M, V | 1 | 1/3 |
| 28 | A | 12 | 1/1 |
| 32 | S, T | 16 | 1/2 |
| 35 | F | 1 | 1/1 |

### Results

[0272] Library construction and phage stock preparation: The new library was designed based on a set of IL-6 binding Z variants with verified binding properties (Example 4). The theoretical size of the designed library was 2.6×10⁷ Z variants. The actual size of the library, determined by titration after transformation to E. coli ER2738 cells, was 1.8×10⁹ transformants.

[0273] The library quality was tested by sequencing of 192 transformants and by comparing their actual sequences with the theoretical design. The contents of the actual library compared to the theoretical library were shown to be satisfying. A maturated library of potential binders to IL-6 was thus successfully constructed.

### Example 6

### Selection, Screening and Characterization of Z Variants From the Second Maturated Library

### Materials and Methods

[0274] Second phage display selection of maturated IL-6 binding Z variants: The target protein hIL-6 was biotinylated as described in Example 4. Phage display selections, using the second maturated library of Z variant molecules described in Example 5 were performed against hIL-6 essentially as described in Example 4, with the following exceptions. The selection volume was 4 ml in cycle 1 for all tracks. In cycle 2, selection tracks 1-2 and 1-3 were handled in one common tube and not separated until after the last 1 min wash, whereupon they were treated separately. Also in cycle 4, each set of the selection tracks 1-1-1-1 to 1-1-1-3, 1-1-1-4 to 1-1-1-6, 1-1-2-1 to 1-1-2-3 and 1-1-2-4 to 1-1-2-6, respectively, were handled in a common tube and split into three separate tubes after the last 1 min wash and thereafter treated separately using the different washing strategies outlined in Table 11. The bound phage particles were eluted using glycine-HCl, pH 2.2, as described in Example 1. The amplification of phage particles between the selection cycles was performed essentially as described in Example 1.

[0275] An overview of the selection strategy and parameters used, describing the differences in the selection tracks in terms of lowered target concentration and an increased number of washes, is shown in Table 11.

[0276] Sequencing of potential binders: Individual clones from the different selection tracks were picked for sequencing. All clones subjected to the ELISA screening were sequenced. Amplification of gene fragments and sequence analysis of gene fragments were performed essentially as described in Example 1.

[0277] ELISA screening of Z variants: Single colonies containing Z variants (expressed as Z variant ABD fusion proteins as described in Example 1) were randomly picked from the selected clones of the IL-6 second maturated library and cultivated as described in Example 1. Preparation of the periplasmic supernatants and ELISA screenings were performed essentially as described in Example 1 and freeze thawing was performed in 150 pl PBST 0.05% and repeated 8 times. Biotinylated hIL-6 was used at a concentration of 0.25 nM. The periplasmic fraction of the IL-6 binder Z06814 (SEQ ID NO:1512) was used in duplicate as positive control on each ELISA plate. As a negative control, periplasm containing ABD only was assayed against biotinylated hIL-6.

TABLE 11
Overview of the selection strategy for the second maturation

| | | Phage | | | | Number | | |
|---|---|---|---|---|---|---|---|---|
| | | stock | | | | of 4 h | | |
| | | from | | | | washes | Number | Number |
| | | library or | Target | Number | Number | with | of | of over |
| | Selection | selection | concentration | of 1 min | of 4 h | unlabeled | overnight | weekend |
| Cycle | track | track | (nM) | washes | washes | Z06814 | washes | washes |
| 1 | 1 | Zlib006IL- | 50 | 5 | — | — | — | — |
| | | 6A.II | | | | | | |
| 1 | 2 | Zlib006IL- | 10 | 5 | — | — | — | — |
| | | 6A.II | | | | | | |
| 2 | 1-1 | 1 | 10 | 15 | — | — | — | — |
| 2 | 1-2 | 1 | 5 | 15 | — | — | — | — |
| 2 | 1-3 | 1 | 5 | 15 | 1 | — | — | — |
| 2 | 2-1 | 2 | 2.5 | 12 | — | — | — | — |
| 3 | 1-1-1 | 1-1 | 1 | 5 | — | 1 | — | — |
| 3 | 1-1-2 | 1-1 | 1 | 5 | — | 1 | — | — |
| 3 | 1-2-1 | 1-2 | 0.5 | 15 | — | — | — | — |
| 3 | 1-3-1 | 1-3 | 0.5 | 15 | — | — | — | — |
| 3 | 2-1-1 | 2-1 | 0.5 | 12 | — | — | — | — |
| 3 | 2-1-2 | 2-1 | 0.1 | 12 | — | — | — | — |
| 4 | 1-1-1-1 | 1-1-1 | 1 | 5 | — | 1 | — | — |
| 4 | 1-1-1-2 | 1-1-1 | 1 | 5 | — | — | 1 | — |
| 4 | 1-1-1-3 | 1-1-1 | 1 | 5 | — | — | — | 1 |
| 4 | 1-1-1-4 | 1-1-1 | 1 | 5 | — | 1 | — | — |
| 4 | 1-1-1-5 | 1-1-1 | 1 | 5 | — | — | 1 | — |
| 4 | 1-1-1-6 | 1-1-1 | 1 | 5 | — | — | — | 1 |
| 4 | 1-1-2-1 | 1-1-2 | 1 | 5 | — | 1 | — | — |
| 4 | 1-1-2-2 | 1-1-2 | 1 | 5 | — | — | 1 | — |
| 4 | 1-1-2-3 | 1-1-2 | 1 | 5 | — | — | — | 1 |
| 4 | 1-1-2-4 | 1-1-2 | 1 | 5 | — | 1 | — | — |
| 4 | 1-1-2-5 | 1-1-2 | 1 | 5 | — | — | 1 | — |
| 4 | 1-1-2-6 | 1-1-2 | 1 | 5 | — | — | — | 1 |
| 4 | 1-2-1-1 | 1-2-1 | 0.5 | 15 | — | — | — | — |
| 4 | 1-2-1-2 | 1-2-1 | 0.5 | 15 | 1 | — | — | — |
| 4 | 1-3-1-1 | 1-3-1 | 0.5 | 15 | — | — | — | — |
| 4 | 2-1-1-1 | 2-1-1 | 0.5 | 12 | — | — | — | — |
| 4 | 2-1-2-1 | 2-1-2 | 0.1 | 12 | — | — | — | — |

[0278] ELISA EC50 analysis of IL-6 binders: A selection of IL-6 binders was subjected to an analysis of the response against a dilution series of biontinylated hIL-6 using ELISA as described in Example 2. Biotinylated protein was added at a concentration of 5 nM and diluted stepwise 1:3 down to 83 fM. As a background control, all Z variants were also assayed without added target protein. Periplasm samples containing the primary IL-6 binder Z06814 (SEQ ID NO:1512) as well as maturated binder Z11632 (SEQ ID NO:7) were included as positive controls. As a negative control, periplasm containing ABD only was assayed against biotinylated hIL-6. Obtained values were analyzed using GraphPad Prism 5 and non-linear regression.

### Results

[0279] Second phage display selection of maturated IL-6 binding Z variants: Selection was performed in 17 parallel tracks in total, each track containing four cycles. The selection tracks differed in target concentration, selection time and wash conditions as outlined in Table 11.

[0280] Sequencing of potential binders: Randomly picked clones were sequenced. Each individual Z variant was given an identification number, Z#####, as described in Example 1. In total, 707 new unique Z variant molecules were identified. The amino acid sequences of 58 residues long Z variants are listed in FIG. 1 and in the sequence listing as SEQ ID NO:1-6, SEQ ID NO:8-14, SEQ ID NO:90-150 and SEQ ID NO:872-1502.The deduced IL-6 binding motifs (BM) extend from position 8 to position 36 in each sequence. The amino acid sequences of the 49 amino acid residues long polypeptides predicted to constitute the complete three-helix bundle within each of these Z variants (BMod) extend from position 7 to position 55.

[0281] ELISA screening of Z variants: Clones obtained after four selection cycles were produced in 96-well plates and screened for human IL-6 binding activity using ELISA. All randomly picked clones were analyzed. 705 of the 707 unique Z variants were found to give a response of 3× the negative controls or higher (0.3-2.3 AU) against hIL-6 at a concentration of 0.25 nM. Positive signals were shown for clones originating from all selection tracks. The average response of the negative controls on the plates was 0.085 AU.

[0282] ELISA EC50 analysis of IL-6 binders: A subset of Z variants was selected based on the result in the ELISA experiment described above. All Z variants exhibiting an absorbance of over 1.6 AU or a response over 1.7 after normalizing the response against the average response of the duplicate positive control Z06814 (SEQ ID NO:1512) on each plate were subjected to a target titration in ELISA format as described in Example 4. Periplasm samples with the maturated binder Z11632 (SEQ ID NO:7) as well as the primary binder Z06814 (SEQ ID NO:1512) were also assayed as positive controls. Obtained values were analyzed and their respective EC50 values were calculated (Table 12).

TABLE 12
Calculated EC50 values from ELISA titration analysis
of Z variants from the second maturation as well
as positive controls Z06814 and Z11632

| Z variant | SEQ ID NO | EC50 ELISA (M) |
|---|---|---|
| Z14521 | 90 | 2.3 × 10⁻¹⁰ |
| Z14524 | 91 | 2.7 × 10⁻¹⁰ |
| Z14525 | 92 | 2.5 × 10⁻¹⁰ |
| Z14538 | 93 | 3.2 × 10⁻¹⁰ |
| Z14547 | 94 | 2.5 × 10⁻¹⁰ |
| Z14550 | 95 | 2.7 × 10⁻¹⁰ |
| Z14551 | 96 | 2.6 × 10⁻¹⁰ |
| Z14556 | 97 | 2.8 × 10⁻¹⁰ |
| Z14559 | 98 | 2.3 × 10⁻¹⁰ |
| Z14596 | 99 | 2.4 × 10⁻¹⁰ |
| Z14609 | 100 | 3.0 × 10⁻¹⁰ |
| Z14614 | 101 | 3.8 × 10⁻¹⁰ |
| Z14620 | 102 | 3.1 × 10⁻¹⁰ |
| Z14630 | 6 | 2.5 × 10⁻¹⁰ |
| Z14634 | 103 | 2.3 × 10⁻¹⁰ |
| Z14645 | 104 | 2.5 × 10⁻¹⁰ |
| Z14651 | 105 | 2.4 × 10⁻¹⁰ |
| Z14662 | 106 | 2.7 × 10⁻¹⁰ |
| Z14673 | 107 | 2.3 × 10⁻¹⁰ |
| Z14700 | 8 | 2.4 × 10⁻¹⁰ |
| Z14706 | 108 | 2.3 × 10⁻¹⁰ |
| Z14710 | 109 | 2.6 × 10⁻¹⁰ |
| Z14712 | 9 | 2.6 × 10⁻¹⁰ |
| Z14720 | 110 | 2.2 × 10⁻¹⁰ |
| Z14722 | 111 | 3.2 × 10⁻¹⁰ |
| Z14731 | 112 | 2.1 × 10⁻¹⁰ |
| Z14746 | 113 | 2.8 × 10⁻¹⁰ |
| Z14765 | 114 | 2.7 × 10⁻¹⁰ |
| Z14767 | 115 | 2.4 × 10⁻¹⁰ |
| Z14782 | 116 | 2.4 × 10⁻¹⁰ |
| Z14783 | 117 | 2.4 × 10⁻¹⁰ |
| Z14784 | 118 | 2.5 × 10⁻¹⁰ |
| Z14788 | 119 | 3.0 × 10⁻¹⁰ |
| Z14829 | 120 | 2.7 × 10⁻¹⁰ |
| Z14861 | 4 | 2.3 × 10⁻¹⁰ |
| Z14862 | 10 | 2.2 × 10⁻¹⁰ |
| Z14867 | 121 | 2.6 × 10⁻¹⁰ |
| Z14868 | 122 | 2.8 × 10⁻¹⁰ |
| Z14878 | 123 | 2.9 × 10⁻¹⁰ |
| Z14888 | 124 | 2.2 × 10⁻¹⁰ |
| Z14929 | 125 | 2.1 × 10⁻¹⁰ |
| Z14944 | 126 | 1.9 × 10⁻¹⁰ |
| Z14976 | 1 | 1.6 × 10⁻¹⁰ |
| Z14984 | 5 | 1.6 × 10⁻¹⁰ |
| Z14990 | 127 | 2.5 × 10⁻¹⁰ |
| Z14992 | 128 | 2.8 × 10⁻¹⁰ |
| Z15003 | 129 | 3.0 × 10⁻¹⁰ |
| Z15015 | 2 | 1.8 × 10⁻¹⁰ |
| Z15024 | 130 | 3.1 × 10⁻¹⁰ |
| Z15025 | 131 | 2.1 × 10⁻¹⁰ |
| Z15031 | 132 | 2.1 × 10⁻¹⁰ |
| Z15036 | 11 | 2.4 × 10⁻¹⁰ |
| Z15042 | 133 | 2.2 × 10⁻¹⁰ |
| Z15053 | 134 | 2.4 × 10⁻¹⁰ |
| Z15057 | 135 | 2.3 × 10⁻¹⁰ |
| Z15067 | 136 | 2.2 × 10⁻¹⁰ |
| Z15079 | 137 | 2.1 × 10⁻¹⁰ |
| Z15082 | 138 | 2.2 × 10⁻¹⁰ |
| Z15097 | 139 | 2.2 × 10⁻¹⁰ |
| Z15102 | 140 | 2.1 × 10⁻¹⁰ |
| Z15110 | 12 | 2.0 × 10⁻¹⁰ |
| Z15111 | 141 | 2.3 × 10⁻¹⁰ |
| Z15117 | 142 | 2.1 × 10⁻¹⁰ |
| Z15122 | 3 | 1.7 × 10⁻¹⁰ |
| Z15126 | 13 | 1.5 × 10⁻¹⁰ |
| Z15129 | 143 | 2.1 × 10⁻¹⁰ |
| Z15140 | 144 | 2.1 × 10⁻¹⁰ |
| Z15141 | 145 | 2.3 × 10⁻¹⁰ |
| Z15142 | 14 | 1.6 × 10⁻¹⁰ |
| Z15145 | 146 | 2.3 × 10⁻¹⁰ |
| Z15151 | 147 | 1.9 × 10⁻¹⁰ |
| Z15159 | 148 | 1.8 × 10⁻¹⁰ |
| Z15162 | 149 | 1.8 × 10⁻¹⁰ |
| Z15164 | 150 | 2.0 × 10⁻¹⁰ |
| Z06814 | 1512 | 3.2 × 10⁻¹⁰ |
| Z11632 | 7 | 2.5 × 10⁻¹⁰ |

### Example 7

### Subcloning, Production and Characterization of a Subset of IL-6 Binding Z Variants

[0283] In this Example, a subset of affinity-matured IL-6 binding Z variants were produced and functionally assessed by SPR, ELISA, cell-based assays and CD. SPR was used for measuring the kinetic parameters of Z variants interacting with IL-6. Competition ELISA was applied to investigate the binding mode of Z variants to human IL-6 protein. A TF-1 cell-based assay was applied to assess the ability of Z variants to block IL-6 dependent signaling. CD was used to investigate the secondary structure of the Z variants and determine their melting temperatures.

### Materials and Methods

[0284] Subcloning of Z variants into expression vectors: The DNA of 14 IL-6 binding Z variants, Z11632 (SEQ ID NO:7), Z14630 (SEQ ID NO:6), Z14700 (SEQ ID NO:8), Z14712 (SEQ ID NO:9), Z14861 (SEQ ID NO:4), Z14862 (SEQ ID NO:10), Z14976 (SEQ ID NO:1), Z14984 (SEQ ID NO:5), Z15015 (SEQ ID NO:2), Z15036 (SEQ ID NO:11), Z15110 (SEQ ID NO:12), Z15122 (SEQ ID NO:3), Z15126 (SEQ ID NO:13) and Z15142 (SEQ ID NO:14), was amplified from the library vector pAY02592. The subcloning was performed as described in Example 2. The Z gene fragments were subcloned into the expression vector pAY01448 resulting in the encoded sequence MGSSHHHHHHLQ-[Z#####]-VD.

[0285] Protein expression and purification under denatured conditions: E. coli Rosetta cells (Novagen) were transformed with plasmids containing the gene fragment of each respective IL-6 binding Z variant and cultivated at 37° C. in 100 ml of TSB-YE medium supplemented with 50 μg/ml kanamycin. Expression was induced at OD₆₀₀=0.8 by addition of IPTG at a final concentration of 1 mM and the cultures were incubated at 25° C. for another 16-20 h. The cells were harvested by centrifugation.

[0286] Protein purification was performed under denatured conditions essentially as described in Example 2. Protein concentrations were determined by measuring the absorbance at 280 nm, using the extinction coefficient of the respective protein. The purity of the IL-6 binding Z variants was analyzed by SDS-PAGE stained with Coomassie Blue.

[0287] Protein expression and purification under native conditions: E. coli BL21 (DE3) cells (NEB, cat. no. C2527I) were transformed with plasmids containing gene fragments of matured variants Z11632 (SEQ ID NO:7), Z14630 (SEQ ID NO:6), Z14700 (SEQ ID NO:8), Z14712 (SEQ ID NO:9), Z14861 (SEQ ID NO:4), Z14862 (SEQ ID NO:10), Z14976 (SEQ ID NO:1), Z14984 (SEQ ID NO:5), Z15015 (SEQ ID NO:2), Z15036 (SEQ ID NO:11), Z15110 (SEQ ID NO:12), Z15122 (SEQ ID NO:3), Z15142 (SEQ ID NO:14), of the primary Z variant Z06814 (SEQ ID NO:1512), as well as of the control Z variant Z04726 (SEQ ID NO:1553). Transformed bacterial cells were cultivated at 37° C. in 1000 ml of LB medium supplemented with 50 μg/ml kanamycin. In order to induce protein expression, IPTG was added to a final concentration of 0.1 mM at OD₆₀₀=0.8 and the cultures were incubated at 25° C. for 17 h. The cells were harvested by centrifugation at 4° C. and 8000 rpm for 30 min. Supernatants were discarded and cell pellets re-suspended in 10 ml PBS. After cell disruption by sonication, cell debris was removed by centrifugation and each supernatant was applied on 2 ml Ni-NTA columns (QIAGEN, cat. no. 30410) equilibrated with 20 ml wash buffer (20 mM NaH₂PO₄, 10 mM NaCl, 20 mM imidazole, pH 6.0). Contaminants were removed by washing with wash buffer, and Z variants were eluted with elution buffer (20 mM NaH₂PO₄, 10 mM NaCl, 250 mM imidazole, pH 6.0). The eluents were subjected to purification on an ion exchange column (Life Technologies, cat. no. 4481317), and Z variants were eluted by an increasing salt concentration. Buffer solutions of eluents were then changed to PBS (10 mM Na₂HPO₄, 1.8 mM KH₂PO₄, 137 mM NaCl, 2.7 mM KCl) using a VIVASPIN 6 column (Sartorius, cat. no. VS0691). The purity of Z variants was analyzed by SDS-PAGE stained with Coomassie Blue.

[0288] ProteOn kinetic analysis: Kinetic constants (kₒₙ and k_{off}) and affinities (K_{D}) for human IL-6 were determined for 6 Hisₛ-tagged Z variants purified under denatured conditions. The IL-6 binding variants Z06814 (SEQ ID NO:1512), Z14861 (SEQ ID NO:4), Z014976 (SEQ ID NO:1), Z14984 (SEQ ID NO:5), Z15015 (SEQ ID NO:2), and Z15122 (SEQ ID NO:3) were diluted to 5 μg/ml in 10 mM NaAc buffer, pH 4.5, and immobilized separately on GLC chip (Bio-Rad, cat. no. 176-5011). The immobilization was performed using amine coupling chemistry according to the manufacturer's recommendations and PBST 0.05% was used as running buffer. PBST 0.05% was also used as running buffer in the kinetic experiment using a flow rate was 60 μl/min. The analyte hIL-6 was diluted in the PBST 0.05% running buffer to final concentrations of 50 nM, 12.5nM, 3.1 nM, 0.78 nM, 0.19 nM and 0 nM and injected in triplicate for 3 min, followed by dissociation in running buffer for 90 min. After dissociation, the surfaces were regenerated with HCl supplemented with 0.05% Tween 20. Kinetic constants were calculated from the sensorgrams using a 1:1 model in Bio-Rad manager Software (Bio-Rad).

[0289] Analysis of binding site: The interference of 14 maturated IL-6 binding Z variants (purified under denatured conditions) with the interaction between human gp130 (hgp130) and the hIL-6/hIL-6Rα complex was assessed as described in Example 2. The primary binder Z06814 and the hIL-6Rα binding antibody tocilizumab were included for comparison.

[0290] TF-1 cell-based assay: TF-1 cells were cultured in RPMI1640 with L-glutamine (HyClone, cat. no. SH30027) supplemented with 10% FBS

[0291] (HyClone, cat. no. SH30919.03), Pen-Strep (HyClone, cat. no. 15140-163) and 2 ng/ml rhGM-CSF (R&D Systems, cat. no. 215-GM-010). Prior to use, cells were washed twice in RPMI-1640 in absence of rhGM-CSF. Cells were then counted and dispensed into a 96-well plate (Corning, cat. no. 3596) at a density of 4×10⁴ cells per well. In separate plates, serial dilutions (concentration range 10-0.00061 nM) of Z variants (purified under native conditions), tocilizumab (Roche) and control IgG (Jackson Immunoresearch, cat. no. Jac-009-000-003) were incubated in the presence of 0.099 nM rhlL-6 (R&D Systems, cat. no. 206-IL/CF). These pre-mixtures were then transferred to wells containing TF-1 cells, which were incubated for 72 h at 37° C. in a humidified 5% CO₂ atmosphere. During the last four hours of incubation, 10 μl of WST (DoGen, cat. no. EZ3000) were included per well. The absorbance was measured at 450 nM using a Victor X3 plate reader (Perkin Elmer). Relative cell viability was calculated by dividing the absorbance of each well by the mean absorbance of IL-6-treated wells in each plate. The data was assessed by non-linear regression to a four-parameter dose-response curve, and the half-maximal inhibitory concentration (1050) was determined using Graphpad Prism software.

[0292] CD analysis: CD analysis was performed as described in Example 2 using Z variants purified under native conditions.

### Results

[0293] ProteOn kinetic analysis: The interactions of 6 His₆-tagged IL-6-binding Z variants with human IL-6 were analyzed in a ProteOn instrument by injecting various concentrations of the hIL-6 over surfaces containing different immobilized Z variants. The ligand immobilization levels of the surfaces were between 100-220 RU each. A summary of the kinetic parameters (K_{D}, kₐ (kₒₙ) and k_{d} (k_{off})) for binding of hIL-6 to the Z variants using a 1:1 interaction model is given in Table 13.

TABLE 13
Kinetic parameters for binding of hIL-6 to Z variants

| | SEQ | kₒₙ | k_{off} | K_{D} |
|---|---|---|---|---|
| Z variant | ID NO: | (M⁻¹s⁻¹) | (s⁻¹) | (M) |
| His₆-Z06814 | 1512 | 4.3 × 10⁵ | 8.8 × 10⁻⁵ | 2.0 × 10⁻¹⁰ |
| His₆-Z14861 | 4 | 3.6 × 10⁵ | 6.3 × 10⁻⁵ | 1.7 × 10⁻¹⁰ |
| His₆-Z14976 | 1 | 3.1 × 10⁵ | 2.7 × 10⁻⁵ | 8.8 × 10⁻¹¹ |
| His₆-Z14984 | 5 | 3.0 × 10⁵ | 7.4 × 10⁻⁵ | 2.5 × 10⁻¹⁰ |
| His₆-Z15015 | 2 | 4.3 × 10⁵ | 7.2 × 10⁻⁵ | 1.7 × 10⁻¹⁰ |
| His₆-Z15122 | 3 | 3.1 × 10⁵ | 3.9 × 10⁻⁵ | 1.2 × 10⁻¹⁰ |

[0294] Analysis of binding site: All maturated IL-6 binding Z variants showed a clear concentration-dependent blocking of the trans-signaling resembling interaction between preformed hIL-6/hIL-6Rα complexes and hgp130 (FIG. 5). Each maturated Z variant showed a higher blocking capacity than both the primary binder Z06814 and tocilizumab, i.e. which would correspond to 1050 values less than 1.6 nM.

[0295] TF-1 cell-based assay: A TF-1 cell-based assay was conducted to evaluate the efficacy and potency of IL-6 binding Z variants in the classical signaling pathway. This assay showed that all affinity-matured IL-6 binding Z variants were capable of blocking IL-6 dependent growth of the TF-1 cells (FIG. 6). The calculated 1050 values for Z variants and for the hIL-6Rα binding antibody tocilizumab are shown in Table 14.

TABLE 14
IC50 values for matured Z variants blocking
the IL-6 dependent growth of TF-1 cells

| Z variant | SEQ ID NO: | IC50 (M) |
|---|---|---|
| His₆-Z11632 | 7 | 1.2 × 10⁻¹⁰ |
| His₆-Z14630 | 6 | 8.7 × 10⁻¹¹ |
| His₆-Z14700 | 8 | 1.0 × 10⁻¹⁰ |
| His₆-Z14712 | 9 | 2.2 × 10⁻¹⁰ |
| His₆-Z14861 | 4 | 1.9 × 10⁻¹⁰ |
| His₆-Z14862 | 10 | 4.3 × 10⁻¹⁰ |
| His₆-Z14976 | 1 | 4.2 × 10⁻¹¹ |
| His₆-Z14984 | 5 | 2.7 × 10⁻¹⁰ |
| His₆-Z15015 | 2 | 2.7 × 10⁻¹¹ |
| His₆-Z15036 | 11 | 1.8 × 10⁻¹⁰ |
| His₆-Z15110 | 12 | 9.3 × 10⁻¹⁰ |
| His₆-Z15122 | 3 | 8.5 × 10⁻¹¹ |
| His₆-Z15142 | 14 | 5.1 × 10⁻¹⁰ |
| His₆-Z06814 | 1512 | 1.3 × 10⁻¹⁰ |
| tocilizumab | N/A | 4.1 × 10⁻¹⁰ |

[0296] CD analysis: The CD spectra determined for 10 matured Z variants showed that each one had an α-helical structure at 20° C. The melting temperatures (Tm) determined by variable temperature measurement are shown in Table 15.

TABLE 15
Melting temperatures for a subset of matured Z variants

| Z variant | SEQ ID NO: | Tm (° C.) |
|---|---|---|
| His₆-Z11632 | 7 | 51 |
| His₆-Z14630 | 6 | 57 |
| His₆-Z14700 | 8 | 53 |
| His₆-Z14712 | 9 | 55 |
| His₆-Z14861 | 4 | 48 |
| His₆-Z14862 | 10 | 53 |
| His₆-Z15015 | 2 | 56 |
| His₆-Z15036 | 11 | 59 |
| His₆-Z15110 | 12 | 50 |
| His₆-Z15142 | 14 | 53 |

### Example 8

### In Vivo Activity of IL-6 Binding Z Variants in Fusion with ABD

[0297] A Serum Amyloid A (SAA) mouse model was used in order to explore the in vivo blocking effect of the IL-6 binding Z variants in fusion with ABD. The acute phase protein SAA is secreted from liver cells and can be induced by the proinflammatory cytokines IL-1, IL-6 and TNF. Due to the sequence homology of the human and mouse cytokines, the human variants are able to act on their corresponding mouse receptors and induce a murine SAA response. Note, that the human TNF protein is only able to interact with murine TNFRII (not murine TNFRI).

### Materials and Methods

[0298] The IL-6 targeting Z variant Z06814 (SEQ ID NO:1512) and a control Z variant Z04726 (SEQ ID NO:1535) binding an irrelevant target, were cloned and produced in fusion with the ABD variant PP013 (SEQ ID NO:1554) as described in Example 2. Four groups of Balb/c mice (n=8) were injected subcutaneously (s.c.) with various doses (0, 0.025, 2.5 or 25 mg/kg body weight) of Z06814-ABD 9 h prior to intraperitoneal (i.p.) administration of hIL-6 at 5 μg/kg (R&D Systems). A fifth group of mice (n=8) received 25 mg/kg of Z04726-ABD. Two additional control groups of mice received PBS (n=4) and 25 mg/kg of Z06814-ABD (n=8), respectively, but no subsequent IL-6 injection. After 20 h, the blood was taken by cardiac puncture and serum was collected.

[0299] Serum was assessed for the content of murine SAA by ELISA (Tridelta) according to the manufacturer's instructions. In brief, diluted serum samples were added to SAA-precoated plates together with anti-SAA-HRP. The plates were incubated for 1 h and then washed four times. TMB substrate was added for 20 min and the reaction was stopped with stop solution. The absorbance was measured at 450 nm using a microplate reader (Victor³, Perkin Elmer).

### Results

[0300] The anti-arthritic efficacy of the Z variant Z06814 (SEQ ID NO:1512) was assessed in vivo using a mouse model for IL-6 triggered serum amyloid-A (SAA) protein release. Four groups of mice were given 0, 0.025, 2.5 or 25 mg/kg body weight of the IL-6 binding Z06814-ABD fusion protein or 25 mg/kg of a control Z04726-ABD fusion protein 9 h before an injection of 5 μg/kg body weight of hIL-6. After an additional 22 h, the levels of SAA protein were measured and compared between the different groups. In animals receiving either no Z06814-ABD or 25 mg/kg of the control Z04726-ABD fusion, SAA protein levels in serum increased to levels of approximately 500-600 μg/ml. Control animals given PBS only (and no hIL-6) exhibited levels in the range of 16-64 μg/ml. In animals given Z06814-ABD, significantly lower SAA protein levels were measured in a dose-dependent manner (FIG. 7). For the group given the highest dose of Z06814-ABD (25 mg/kg body weight), SAA protein levels were as low as for animals given no hIL-6 injection.

### ITEMIZED LISTING OF EMBODIMENTS

[0301] 1. IL-6 binding polypeptide, comprising an IL-6 binding motif BM, which motif consists of an amino acid sequence selected from:
[0302] i)

EEX₃X₄AWX₇EIHX₁₁LPNLX₁₆X₁₇X₁₈QX₂₀X₂₁AFIX₂₅X₂₆LX₂₈X₂₉

wherein, independently from each other,

[0303] X₃ is selected from A, F, H, K, Q, R, S, W and Y;

[0304] X₄ is selected from A, D, E, F, H, I, K, L, M, N, Q, R, S, T, V and Y;

[0305] X₇ is selected from F, H, I, K, L, M, N, R, S, T, V, W and Y;

[0306] X₁₁ is selected from A, I, K, L, M, N, R, S, T and V;

[0307] X₁₆ is selected from N and T;

[0308] X₁₇ is selected from A, I, T and V;

[0309] X₁₈ is selected from D, E, G, H, K, N, Q, R, S and T;

[0310] X₂₀ is selected from I, L, M, R, T and V;

[0311] X₂₁ is selected from A, S, T and V;

[0312] X₂₅ is selected from I, M, Q, S, T, V and W;

[0313] X₂₆ is selected from K and S;

[0314] X₂₈ is selected from F, L, M and Y; and

[0315] X₂₉ is selected from D and R; and
[0316] ii) an amino acid sequence which has at least 93% identity to the sequence defined in i).

[0317] 2. IL-6 binding polypeptide according to item 1, wherein in sequence i):

[0318] X₃ is selected from A, H, K, Q, R and Y;

[0319] X₄ is selected from A, D, E, F, H, I, K, L, M, N, Q, R, S, T, V and Y;

[0320] X₇ is selected from F, H, I, K, L, M, N, R, T, V, W and Y;

[0321] X₁₁ is selected from A, I, K, L, N, S, T and V;

[0322] X₁₆ is T;

[0323] X₁₇ is selected from A, I, T and V;

[0324] X₁₈ is selected from D, E, H, K, N, Q, R, S and T;

[0325] X₂₀ is selected from I, L, M, R and V;

[0326] X₂₁ is selected from A, S and V;

[0327] X₂₅ is selected from I, Q, S, T, V and W;

[0328] X₂₆ is K;

[0329] X₂₈ is selected from F, L, M and Y; and

[0330] X₂₉ is D.

[0331] 3. IL-6 binding polypeptide according to item 1 or 2, wherein sequence i) fulfills at least six of the eleven conditions I-XI:

[0332] I. X₃ is selected from K and R;

[0333] II. X₁₁ is selected from A and L;

[0334] III. X₁₆ is T;

[0335] IV. X₁₇ is selected from I and V;

[0336] V. X₁₈ is selected from D and E;

[0337] VI. X₂₀ is M;

[0338] VII. X₂₁ is A;

[0339] VIII. X₂₅ is selected from S and T;

[0340] IX. X₂₆ is K;

[0341] X. X₂₈ is F; and

[0342] XI. X₂₉ is D.

[0343] 4. IL-6 binding polypeptide according to item 3, wherein sequence i) fulfills at least seven of the eleven conditions I-XI.

[0344] 5. IL-6 binding polypeptide according to item 4, wherein sequence i) fulfills at least eight of the eleven conditions I-XI.

[0345] 6. IL-6 binding polypeptide according to item 5, wherein sequence i) fulfills at least nine of the eleven conditions I-XI.

[0346] 7. IL-6 binding polypeptide according to item 6, wherein sequence i) fulfills at least ten of the eleven conditions I-XI.

[0347] 8. IL-6 binding polypeptide according to item 7, wherein sequence i) fulfills all of the eleven conditions I-XI.

[0348] 9. IL-6 binding polypeptide according to any preceding item, wherein X₁₇X₂₀X₂₁ is selected from VMA and IMA.

[0349] 10. IL-6 binding polypeptide according to any one of items 1-8, wherein X₂₀X₂₁X₂₈ is MAF.

[0350] 11. IL-6 binding polypeptide according to any one of items 1-8, wherein X₁₇X₂₀X₂₈ is selected from VMF and IMF.

[0351] 12. IL-6 binding polypeptide according to any one of items 1-8, wherein X₁₇X₂₁X₂₈ is selected from VAF and IAF.

[0352] 13. IL-6 binding polypeptide according to any preceding item, wherein sequence i) corresponds to the sequence from position 8 to position 36 in a sequence selected from the group consisting of SEQ ID NO:1-1551.

[0353] 14. IL-6 binding polypeptide according to item 13, wherein sequence i) corresponds to the sequence from position 8 to position 36 in a sequence selected from the group consisting of SEQ ID NO:1-1502.

[0354] 15. IL-6 binding polypeptide according to item 14, wherein sequence i) corresponds to the sequence from position 8 to position 36 in a sequence selected from the group consisting of SEQ ID NO:7, SEQ ID NO:15-89 and SEQ ID NO:151-871.

[0355] 16. IL-6 binding polypeptide according to item 14, wherein sequence i) corresponds to the sequence from position 8 to position 36 in a sequence selected from the group consisting of SEQ ID NO:1-6, SEQ ID NO:8-14, SEQ ID NO:90-150 and SEQ ID NO:872-1502.

[0356] 17. IL-6 binding polypeptide according to item 13, wherein sequence i) corresponds to the sequence from position 8 to position 36 in a sequence selected from the group consisting of SEQ ID NO:1-152 and SEQ ID NO:1503-1515.

[0357] 18. IL-6 binding polypeptide according to item 17, wherein sequence i) corresponds to the sequence from position 8 to position 36 in a sequence selected from the group consisting of SEQ ID NO:1-150 and SEQ ID NO:1503-1515.

[0358] 19. IL-6 binding polypeptide according to item 17, wherein sequence i) corresponds to the sequence from position 8 to position 36 in a sequence selected from the group consisting of SEQ ID NO:1-152.

[0359] 20. IL-6 binding polypeptide according to item 18 or 19, wherein sequence i) corresponds to the sequence from position 8 to position 36 in a sequence selected from the group consisting of SEQ ID NO:1-150.

[0360] 21. IL-6 binding polypeptide according to item 19, wherein sequence i) corresponds to the sequence from position 8 to position 36 in a sequence selected from the group consisting of SEQ ID NO:7, SEQ ID NO:15-89 and SEQ ID NO:151-152.

[0361] 22. IL-6 binding polypeptide according to item 20, wherein sequence i) corresponds to the sequence from position 8 to position 36 in a sequence selected from the group consisting of SEQ ID NO:1-6, SEQ ID NO:8-14 and SEQ ID NO:90-150.

[0362] 23. IL-6 binding polypeptide according to item 18, wherein sequence i) corresponds to the sequence from position 8 to position 36 in a sequence selected from the group consisting of SEQ ID NO:1-14 and SEQ ID NO:1503-1515.

[0363] 24. IL-6 binding polypeptide according to item 23, wherein sequence i) corresponds to the sequence from position 8 to position 36 in a sequence selected from the group consisting of SEQ ID NO:1-14 and SEQ ID NO:1512.

[0364] 25. IL-6 binding polypeptide according to item 24, wherein sequence i) corresponds to the sequence from position 8 to position 36 in a sequence selected from the group consisting of SEQ ID NO:1-14.

[0365] 26. IL-6 binding polypeptide according to any one of items 16, 22 and 25, wherein sequence i corresponds to the sequence from position 8 to position 36 in a sequence selected from the group consisting of SEQ ID NO:1-5.

[0366] 27. IL-6 binding polypeptide according to item 24, wherein sequence i) corresponds to the sequence from position 8 to position 36 in SEQ ID NO:1512.

[0367] 28. IL-6 binding polypeptide according to any preceding item, wherein said IL-6 binding motif forms part of a three-helix bundle protein domain.

[0368] 29. IL-6 binding polypeptide according to item 28, wherein said IL-6 binding motif essentially forms part of two helices with an interconnecting loop, within said three-helix bundle protein domain.

[0369] 30. IL-6 binding polypeptide according to item 29, wherein said three-helix bundle protein domain is selected from bacterial receptor domains.

[0370] 31. IL-6 binding polypeptide according to item 30, wherein said three-helix bundle protein domain is selected from domains of protein A from Staphylococcus aureus or derivatives thereof.

[0371] 32. IL-6 binding polypeptide according to any preceding item, which comprises a binding module BMod, the amino acid sequence of which is selected from:
[0372] iii)

K-[BM]-DPSQSXₐX_{b}LLX_{c}EAKKLX_{d}XₑX_{f}Q;

wherein

[0373] [BM] is an IL-6 binding motif as defined in any one of items 1-27 provided that X₂₉ is D;

[0374] Xₐ is selected from A and S;

[0375] X_{b} is selected from N and E;

[0376] X_{c} is selected from A, S and C;

[0377] X_{d} is selected from E, N and S;

[0378] Xₑ is selected from D, E and S;

[0379] X_{f} is selected from A and S; and

[0380] iv) an amino acid sequence which has at least 91% identity to a sequence defined by iii).

[0381] 33. IL-6 binding polypeptide according to any one of items 1-31, which comprises a binding module BMod, the amino acid sequence of which is selected from:
[0382] v)

K-[BM]-QPEQSXₐX_{b}LLX_{c}EAKKLX_{d}XₑX_{f}Q,

wherein

[0383] [BM] is an IL-6 binding motif as defined in any one of items 1-27 provided that X₂₉ is R;

[0384] Xₐ is selected from A and S;

[0385] X_{b} is selected from N and E;

[0386] X_{c} is selected from A, S and C;

[0387] X_{d} is selected from E, N and S;

[0388] Xₑ is selected from D, E and S;

[0389] X_{f} is selected from A and S; and

[0390] vi) an amino acid sequence which has at least 91% identity to a sequence defined by v).

[0391] 34. IL-6 binding polypeptide according to any one of items 1-32, wherein sequence iii) corresponds to the sequence from position 7 to position 55 in a sequence selected from the group consisting of SEQ ID NO:1-1551.

[0392] 35. IL-6 binding polypeptide according to item 34, wherein sequence iii) corresponds to the sequence from position 7 to position 55 in a sequence selected from the group consisting of SEQ ID NO:1-1502.

[0393] 36. IL-6 binding polypeptide according to item 35, wherein sequence iii) corresponds to the sequence from position 7 to position 55 in a sequence selected from the group consisting of SEQ ID NO:7, SEQ ID NO:15-89 and SEQ ID NO:151-871.

[0394] 37. IL-6 binding polypeptide according to item 35, wherein sequence iii) corresponds to the sequence from position 7 to position 55 in a sequence selected from the group consisting of SEQ ID NO:1-6, SEQ ID NO:8-14, SEQ ID NO:90-150 and SEQ ID NO:872-1502.

[0395] 38. IL-6 binding polypeptide according to item 34, wherein sequence iii) corresponds to the sequence from position 7 to position 55 in a sequence selected from the group consisting of SEQ ID NO:1-152 and SEQ ID NO:1503-1515.

[0396] 39. IL-6 binding polypeptide according to item 38, wherein sequence iii) corresponds to the sequence from position 7 to position 55 in a sequence selected from the group consisting of SEQ ID NO:1-150 and SEQ ID NO:1503-1515.

[0397] 40. IL-6 binding polypeptide according to item 35 or 38, wherein sequence iii) corresponds to the sequence from position 7 to position 55 in a sequence selected from the group consisting of SEQ ID NO:1-152.

[0398] 41. IL-6 binding polypeptide according to item 39 or 40, wherein sequence iii) corresponds to the sequence from position 7 to position 55 in a sequence selected from the group consisting of SEQ ID NO:1-150.

[0399] 42. IL-6 binding polypeptide according to item 40, wherein sequence iii) corresponds to the sequence from position 7 to position 55 in a sequence selected from the group consisting of SEQ ID NO:7, SEQ ID NO:15-89 and SEQ ID NO:151-152.

[0400] 43. IL-6 binding polypeptide according to item 41, wherein sequence iii) corresponds to the sequence from position 7 to position 55 in a sequence selected from the group consisting of SEQ ID NO:1-6, SEQ ID NO:8-14 and SEQ ID NO:90-150.

[0401] 44. IL-6 binding polypeptide according to item 39, wherein sequence iii) corresponds to the sequence from position 7 to position 55 in a sequence selected from the group consisting of SEQ ID NO:1-14 and SEQ ID NO:1503-1515.

[0402] 45. IL-6 binding polypeptide according to item 44, wherein sequence iii) corresponds to the sequence from position 7 to position 55 in a sequence selected from the group consisting of SEQ ID NO:1-14 and SEQ ID NO:1512.

[0403] 46. IL-6 binding polypeptide according to item 45, wherein sequence iii) corresponds to the sequence from position 7 to position 55 in a sequence selected from the group consisting of SEQ ID NO:1-14.

[0404] 47. IL-6 binding polypeptide according to any one of items 37, 43 and 46, wherein sequence iii) corresponds to the sequence from position 7 to position 55 in a sequence selected from the group consisting of SEQ ID NO:1-5.

[0405] 48. IL-6 binding polypeptide according to item 45, wherein sequence iii) corresponds to the sequence from position 7 to position 55 in SEQ ID NO:1512.

[0406] 49. IL-6 binding polypeptide according to any preceding item, which comprises an amino acid sequence selected from:

[0407] vii) YA-[BMod]-AP;

[0408] wherein [BMod] is an IL-6 binding module as defined in any one of items 32-48; and

[0409] viii) an amino acid sequence which has at least 90% identity to a sequence defined by vii).

[0410] 50. IL-6 binding polypeptide according to any one of items 1-48, which comprises an amino acid sequence selected from:

[0411] ix) FN-[BMod]-AP;

[0412] wherein [BMod] is an IL-6 binding module as defined in any one of items 32-48; and

[0413] x) an amino acid sequence which has at least 90% identity to a sequence defined by ix).

[0414] 51. IL-6 binding polypeptide according to any preceding item, which comprises an amino acid sequence selected from:

ADNNFNK-[BM]-DPSQSANLLSEAKKLNESQAPK;
ADNKFNK-[BM]-DPSQSANLLAEAKKLNDAQAPK;
ADNKFNK-[BM]-DPSVSKEILAEAKKLNDAQAPK;
ADAQQNNFNK-[BM]-DPSQSTNVLGEAKKLNESQAPK;
AQHDE-[BM]-DPSQSANVLGEAQKLNDSQAPK;
VDNKFNK-[BM]-DPSQSANLLAEAKKLNDAQAPK;
AEAKYAK-[BM]-DPSESSELLSEAKKLNKSQAPK;
VDAKYAK-[BM]-DPSQSSELLAEAKKLNDAQAPK;
VDAKYAK-[BM]-DPSQSSELLAEAKKLNDSQAPK;
AEAKYAK-[BM]-DPSQSSELLSEAKKLNDSQAPK;
AEAKYAK-[BM]-DPSQSSELLSEAKKLSESQAPK;
AEAKYAK-[BM]-QPEQSSELLSEAKKLSESQAPK;
AEAKYAK-[BM]-DPSQSSELLSEAKKLESSQAPK;
AEAKYAK-[BM]-QPEQSSELLSEAKKLESSQAPK;
VDAKYAK-[BM]-DPSQSSELLSEAKKLNDSQAPK;
VDAKYAK-[BM]-DPSQSSELLSEAKKLSESQAPK;
VDAKYAK-[BM]-QPEQSSELLSEAKKLSESQAPK;
VDAKYAK-[BM]-DPSQSSELLSEAKKLESSQAPK;
VDAKYAK-[BM]-QPEQSSELLSEAKKLESSQAPK;
VDAKYAK-[BM]-DPSQSSELLAEAKKLNKAQAPK;
and
AEAKYAK-[BM]-DPSQSSELLAEAKKLNKAQAPK;

wherein [BM] is an IL-6 binding motif as defined in any one of items 1-27.

[0415] 52. IL-6 binding polypeptide according to any one of items 1-49, which comprises an amino acid sequence selected from:

[0416] xi)

VDAKYAK-[BM]-DPSQSSELLSEAKKLNDSQAPK;

[0417] wherein [BM] is an IL-6 binding motif as defined in any one of items 1-27; and

[0418] xii) an amino acid sequence which has at least 89% identity to the sequence defined in xi).

[0419] 53. IL-6 binding polypeptide according to any one of items 1-49, which comprises an amino acid sequence selected from:

[0420] xiii)

AEAKYAK-[BM]-DPSQSSELLSEAKKLNDSQAPK;

[0421] wherein [BM] is an IL-6 binding motif as defined in any one of items 1-27, and

[0422] xiv) an amino acid sequence which has at least 89% identity to the sequence defined in xiii).

[0423] 54. IL-6 binding polypeptide according to item 52, wherein sequence xi) is selected from the group consisting of SEQ ID NO:1-1551.

[0424] 55. IL-6 binding polypeptide according to item 54, wherein sequence xi) is selected from the group consisting of SEQ ID NO:1-1502.

[0425] 56. IL-6 binding polypeptide according to item 55, wherein sequence xi) is selected from the group consisting of SEQ ID NO:7, SEQ ID NO:15-89 and SEQ ID NO:151-871.

[0426] 57. IL-6 binding polypeptide according to item 55, wherein sequence xi) is selected from the group consisting of SEQ ID NO:1-6, SEQ ID NO:8-14, SEQ ID NO:90-150 and SEQ ID NO:872-1502.

[0427] 58. IL-6 binding polypeptide according to item 54, wherein sequence xi) is selected from the group consisting of SEQ ID NO:1-152 and SEQ ID NO:1503-1515.

[0428] 59. IL-6 binding polypeptide according to item 58, wherein sequence xi) is selected from the group consisting of SEQ ID NO:1-150 and SEQ ID NO:1503-1515.

[0429] 60. IL-6 binding polypeptide according to item 55 or 58, wherein sequence xi) is selected from the group consisting of SEQ ID NO:1-152.

[0430] 61. IL-6 binding polypeptide according to item 59 or 60, wherein sequence xi) is selected from the group consisting of SEQ ID NO:1-150.

[0431] 62. IL-6 binding polypeptide according to item 60, wherein sequence xi) is selected from the group consisting of SEQ ID NO:7, SEQ ID NO:15-89 and SEQ ID NO:151-152.

[0432] 63. IL-6 binding polypeptide according to item 61, wherein sequence xi) is selected from the group consisting of SEQ ID NO:1-6, SEQ ID NO:8-14 and SEQ ID NO:90-150.

[0433] 64. IL-6 binding polypeptide according to item 59, wherein sequence xi) is selected from the group consisting of SEQ ID NO:1-14 and SEQ ID NO:1503-1515.

[0434] 65. IL-6 binding polypeptide according to item 64, wherein sequence xi) is selected from the group consisting of SEQ ID NO:1-14 and SEQ ID NO:1512.

[0435] 66. IL-6 binding polypeptide according to item 65, wherein sequence xi) is selected from the group consisting of SEQ ID NO:1-14.

[0436] 67. IL-6 binding polypeptide according to any one of items 57, 63 and 66, wherein sequence xi) is selected from the group consisting of SEQ ID NO:1-5.

[0437] 68. IL-6 binding polypeptide according to item 65, wherein sequence xi) is SEQ ID NO:1512.

[0438] 69. IL-6 binding polypeptide according to any preceding item, which is capable of blocking the IL-6 dependent signaling via the cis-signaling pathway and/or the trans-signaling pathway.

[0439] 70. IL-6 binding polypeptide according to item 69, wherein the half maximal inhibitory concentration (1050) of the blocking is at most 1×10⁻⁶ M, such as at most 1×10⁻⁷ M, such as at most 1×10⁻⁸ M, such as at most 1×10⁻⁹ M, such as at most 1×10⁻¹⁰ M.

[0440] 71. IL-6 binding polypeptide according to item 69 or 70, which is capable of blocking the interaction of IL-6/IL-6Rα with gp130.

[0441] 72. IL-6 binding polypeptide according to any preceding item, which is capable of binding to IL-6 such that the EC50 value of the interaction is at most 1×10⁻⁷ M, such as at most 1×10⁻⁸ M, such as at most 1×10⁻⁹ M, such as at most 1×10⁻¹⁰ M.

[0442] 73. IL-6 binding polypeptide according to any preceding item, which is capable of binding to IL-6 such that the K_{D} value of the interaction is at most 1×10⁻⁸ M, such as at most 1×10⁻⁹ M, such as at most 1×10⁻¹⁰ M.

[0443] 74. IL-6 binding polypeptide according to any preceding item which comprises additional amino acids at the C-terminal and/or N-terminal end.

[0444] 75. IL-6 binding polypeptide according to item 74, wherein said additional amino acid(s) improve(s) production, purification, stabilization in vivo or in vitro, coupling or detection of the polypeptide.

[0445] 76. IL-6 binding polypeptide according to any preceding item in multimeric form, comprising at least two IL-6 binding polypeptide monomer units, whose amino acid sequences may be the same or different.

[0446] 77. IL-6 binding polypeptide according to item 76, wherein said IL-6 binding polypeptide monomer units are covalently coupled together.

[0447] 78. IL-6 binding polypeptide according to item 77, wherein the IL-6 binding polypeptide monomer units are expressed as a fusion protein.

[0448] 79. IL-6 binding polypeptide according to item 78, in dimeric form.

[0449] 80. Fusion protein or conjugate comprising
[0450] a first moiety consisting of an IL-6 binding polypeptide according to any preceding item; and
[0451] a second moiety consisting of a polypeptide having a desired biological activity.

[0452] 81. Fusion protein or conjugate according to item 80, wherein said desired biological activity is a therapeutic activity.

[0453] 82. Fusion protein or conjugate according to item 80, wherein said desired biological activity is a binding activity.

[0454] 83. Fusion protein or conjugate according to item 82, wherein said binding activity is albumin binding activity which increases in vivo half-life of the fusion protein or conjugate.

[0455] 84. Fusion protein or conjugate according to item 83, wherein said second moiety comprises the albumin binding domain of streptococcal protein G or a derivative thereof.

[0456] 85. Fusion protein or conjugate according to item 82, wherein said binding activity acts to block a biological activity.

[0457] 86. Fusion protein or conjugate according to item 80, wherein said desired biological activity is an enzymatic activity.

[0458] 87. Fusion protein or conjugate according to item 81, wherein the second moiety is a therapeutically active polypeptide.

[0459] 88. Fusion protein or conjugate according to item 87, wherein the second moiety is an immune response modifying agent.

[0460] 89. Fusion protein or conjugate according to item 87, wherein the second moiety is an anti-cancer agent.

[0461] 90. Fusion protein or conjugate according to any one of items 80, 81, 86, 88 and 89, wherein the second moiety is selected from the group consisting of human endogenous enzymes, hormones, growth factors, chemokines, cytokines and lymphokines.

[0462] 91. IL-6 binding polypeptide, fusion protein or conjugate according to any preceding item, further comprising a label.

[0463] 92. IL-6 binding polypeptide, fusion protein or conjugate according to item 91, wherein said label is selected from the group consisting of fluorescent dyes and metals, chromophoric dyes, chemiluminescent compounds and bioluminescent proteins, enzymes, radionuclides and radioactive particles.

[0464] 93. IL-6 binding polypeptide, fusion protein or conjugate according to any preceding item, comprising a chelating environment provided by a polyaminopolycarboxylate chelator conjugated to the IL-6 binding polypeptide via a thiol group of a cysteine residue or an amine group of a lysine residue.

[0465] 94. A polynucleotide encoding a polypeptide according to any one of items 1-79.

[0466] 95. Expression vector comprising a polynucleotide according to item 94.

[0467] 96. Host cell comprising an expression vector according to item 95.

[0468] 97. Method of producing a polypeptide according to any one of items 1-79, comprising
[0469] culturing a host cell according to item 96 under conditions permissive of expression of said polypeptide from said expression vector, and
[0470] isolating said polypeptide.

[0471] 98. Composition comprising an IL-6 binding polypeptide, fusion protein or conjugate according to any one of items 1-93 and at least one pharmaceutically acceptable excipient or carrier.

[0472] 99. Composition according to item 98, further comprising at least one additional active agent, such as an agent selected from an immune response modifying agent and an anti-cancer agent.

[0473] 100. IL-6 binding polypeptide, fusion protein or conjugate according to any one of items 1-93 or a composition according to any one of items 98-99 for oral, topical, intravenous, intraperitoneal, subcutaneous, pulmonary, transdermal, intramuscular, intranasal, buccal, sublingual or suppository administration, such as for topical administration.

[0474] 101. IL-6 binding polypeptide, fusion protein or conjugate according to any one of items 1-93 or a composition according to any one of items 98-99 for use as a medicament, a diagnostic agent or a prognostic agent.

[0475] 102. IL-6 binding polypeptide, fusion protein or conjugate according to any one of items 1-93 or a composition according to any one of items 98-99 for use as a medicament.

[0476] 103. IL-6 binding polypeptide, fusion protein, conjugate or composition for use according to item 102, wherein said polypeptide, fusion protein, conjugate or composition modulates IL-6 function in vivo.

[0477] 104. IL-6 binding polypeptide, fusion protein, conjugate or composition for use according to any one of items 101-103, in the treatment, prognosis or diagnosis of an IL-6 related disorder.

[0478] 105. IL-6 binding polypeptide, fusion protein, conjugate or composition for use according to any one of items 101-103, in the treatment of an IL-6 related disorder.

[0479] 106. IL-6 binding polypeptide, fusion protein, conjugate or composition for use according to item 105, wherein said IL-6 related disorder is selected from the group consisting of inflammatory diseases, autoimmune diseases, infectious disease, cancer, diabetes, neurological disease and depression.

[0480] 107. IL-6 binding polypeptide, fusion protein, conjugate or composition for use according to item 106, wherein said IL-6 related disorder is selected from the group consisting of inflammatory diseases and autoimmune diseases.

[0481] 108. IL-6 binding polypeptide, fusion protein, conjugate or composition for use according to item 107, wherein said IL-6 related disorder is selected from the group consisting of rheumatoid arthritis (RA), juvenile RA, juvenile idiopathic arthritis or systemic juvenile idiopathic arthritis, vasculitis, psoriatic arthritis, psoriasis, ankylosing spondylitis, chronic inflammatory bowel disease such as Crohn's disease and ulcerative colitis; Grave's disease, Behcet's disease, uveitis, giant cell arteritis, multiple sclerosis (MS), systemic sclerosis, systemic lupus erythematosus (SLE), polymyositis, polymyalgia rheumatic, asthma, chronic obstructive pulmonary disease (COPD), relapsing polychondritis, pancreatitis, peritonitis, nephritis, Kawasaki's disease, Sjögren's syndrome and adult Still's disease.

[0482] 109. IL-6 binding polypeptide, fusion protein, conjugate or composition for use according to item 106, wherein said IL-6 related disorder is cancer, such as a cancer selected from the group consisting of colitis associated cancer, renal cancer, kidney cancer, prostate cancer, malignant lymphoma, multiple myeloma, Castleman's disease, breast cancer and lung cancer.

[0483] 110. IL-6 binding polypeptide, fusion protein, conjugate or composition for use according to item 106, wherein said IL-6 related disorder is selected from Alzheimer's disease, HIV, diabetes, sepsis, cachexia, myelodysplastic syndrome (MDS), liver cirrhosis, graft versus host disease, myocardial infarction, endometriosis and osteoporosis.

[0484] 111. Method of treatment of an IL-6 related disorder, comprising administering to a subject in need thereof an effective amount of an IL-6 binding polypeptide, fusion protein or conjugate according to any one of items 1-93 or a composition according to any one of items 98-99.

[0485] 112. Method according to item 111, wherein said IL-6 related disorder is selected from the group consisting of inflammatory diseases, autoimmune diseases, infectious disease, cancer, diabetes, neurological disease and depression.

[0486] 113. Method according to item 112, wherein said IL-6 related disorder is selected from the group consisting of inflammatory diseases and autoimmune diseases.

[0487] 114. Method according to item 113, wherein said IL-6 related disorder is selected from the group consisting of rheumatoid arthritis (RA), juvenile RA, juvenile idiopathic arthritis or systemic juvenile idiopathic arthritis, vasculitis, psoriatic arthritis, psoriasis, ankylosing spondylitis, chronic inflammatory bowel disease such as Crohn's disease and ulcerative colitis; Grave's disease, Behcet's disease, uveitis, giant cell arteritis, multiple sclerosis (MS), systemic sclerosis, systemic lupus erythematosus (SLE), polymyositis, polymyalgia rheumatic, asthma, chronic obstructive pulmonary disease (COPD), relapsing polychondritis, pancreatitis, peritonitis, nephritis, Kawasaki's disease, Sjögren's syndrome and adult Still's disease.

[0488] 115. Method according to item 112, wherein said IL-6 related disorder is cancer, such as a cancer selected from the group consisting of selected from the group consisting of colitis associated cancer, renal cancer, kidney cancer, prostate cancer, malignant lymphoma, multiple myeloma, Castleman's disease, breast cancer and lung cancer.

[0489] 116. Method according to item 112, wherein said IL-6 related disorder is selected from Alzheimer's disease, HIV, diabetes, sepsis, cachexia, myelodysplastic syndrome (MDS), liver cirrhosis, graft versus host disease, myocardial infarction, endometriosis and osteoporosis.

[0490] 117. Method of detecting IL-6, comprising providing a sample suspected to contain IL-6, contacting said sample with an IL-6 binding polypeptide, fusion protein or conjugate according to any one of items 1-90 or a composition according to any one of items 98-99, and detecting the binding of the IL-6 binding polypeptide, fusion protein, conjugate or composition to indicate the presence of IL-6 in the sample.

[0491] 118. Method for determining the presence of IL-6 in a subject, the method comprising the steps:
[0492] contacting the subject, or a sample isolated from the subject, with an IL-6 binding polypeptide, fusion protein or conjugate according to any one of items 1-93 or a composition according to any one of items 98-99, and
[0493] obtaining a value corresponding to the amount of the IL-6 binding polypeptide, fusion protein, conjugate or composition that has bound in said subject or to said sample.

[0494] 119. Method according to item 118, further comprising a step of comparing said value to a reference.

[0495] 120. Method according to item 118 or 119, wherein said subject is a mammalian subject, such as a human subject.

[0496] 121. Method according to any one of items 118-120, wherein the method is performed in vivo.

[0497] 122. Method according to any one of items 118-120, wherein the method is performed in vitro.

The application's sequence listing, which the Patent Office published only in electronic form, follows.

SEQUENCE LISTING (1561 sequences)

SEQ ID NO: 1 - protein, 58 aa, ARTIFICIAL SEQUENCE
  Engineered IL6 binding polypeptide
VDAKYAKEERKAWYEIHLLPNLTVEQMAAFITKLFDDPSQSSELLSEAKKLNDSQAPK

SEQ ID NO: 2 - protein, 58 aa, ARTIFICIAL SEQUENCE
  Engineered IL6 binding polypeptide
VDAKYAKEERDAWWEIHALPNLTVEQMAAFITKLFDDPSQSSELLSEAKKLNDSQAPK

SEQ ID NO: 3 - protein, 58 aa, ARTIFICIAL SEQUENCE
  Engineered IL6 binding polypeptide
VDAKYAKEERHAWYEIHLLPNLTIDQMAAFISKLFDDPSQSSELLSEAKKLNDSQAPK

SEQ ID NO: 4 - protein, 58 aa, ARTIFICIAL SEQUENCE
  Engineered IL6 binding polypeptide
VDAKYAKEERKAWIEIHNLPNLTIDQMAAFITKLFDDPSQSSELLSEAKKLNDSQAPK

SEQ ID NO: 5 - protein, 58 aa, ARTIFICIAL SEQUENCE
  Engineered IL6 binding polypeptide
VDAKYAKEEKQAWREIHLLPNLTIDQMAAFITKLFDDPSQSSELLSEAKKLNDSQAPK

SEQ ID NO: 6 - protein, 58 aa, ARTIFICIAL SEQUENCE
  Engineered IL6 binding polypeptide
VDAKYAKEEKFAWWEIHKLPNLTVDQVAAFITKLFDDPSQSSELLSEAKKLNDSQAPK

SEQ ID NO: 7 - protein, 58 aa, ARTIFICIAL SEQUENCE
  Engineered IL6 binding polypeptide
VDAKYAKEEREAWFEIHTLPNLTVSQMAAFISKLFDDPSQSSELLSEAKKLNDSQAPK

SEQ ID NO: 8 - protein, 58 aa, ARTIFICIAL SEQUENCE
  Engineered IL6 binding polypeptide
VDAKYAKEERHAWFEIHKLPNLTVDQMAAFITKLFDDPSQSSELLSEAKKLNDSQAPK

SEQ ID NO: 9 - protein, 58 aa, ARTIFICIAL SEQUENCE
  Engineered IL6 binding polypeptide
VDAKYAKEEYLAWNEIHKLPNLTVDQMAAFITKLFDDPSQSSELLSEAKKLNDSQAPK

SEQ ID NO: 10 - protein, 58 aa, ARTIFICIAL SEQUENCE
  Engineered IL6 binding polypeptide
VDAKYAKEEAAAWREIHLLPNLTIDQMAAFITKLFDDPSQSSELLSEAKKLNDSQAPK

SEQ ID NO: 11 - protein, 58 aa, ARTIFICIAL SEQUENCE
  Engineered IL6 binding polypeptide
VDAKYAKEEYEAWFEIHALPNLTVEQMAAFITKLFDDPSQSSELLSEAKKLNDSQAPK

SEQ ID NO: 12 - protein, 58 aa, ARTIFICIAL SEQUENCE
  Engineered IL6 binding polypeptide
VDAKYAKEERRAWTEIHSLPNLTIDQMAAFITKLFDDPSQSSELLSEAKKLNDSQAPK

SEQ ID NO: 13 - protein, 58 aa, ARTIFICIAL SEQUENCE
  Engineered IL6 binding polypeptide
VDAKYAKEERNAWYEIHLLPNLTVEQMAAFITKLFDDPSQSSELLSEAKKLNDSQAPK

SEQ ID NO: 14 - protein, 58 aa, ARTIFICIAL SEQUENCE
  Engineered IL6 binding polypeptide
VDAKYAKEERMAWYEIHSLPNLTVDQMAAFITKLFDDPSQSSELLSEAKKLNDSQAPK

SEQ ID NO: 15 - protein, 58 aa, ARTIFICIAL SEQUENCE
  Engineered IL6 binding polypeptide
VDAKYAKEEREAWYEIHVLPNLTVSQIAAFISKLFDDPSQSSELLSEAKKLNDSQAPK

SEQ ID NO: 16 - protein, 58 aa, ARTIFICIAL SEQUENCE
  Engineered IL6 binding polypeptide
VDAKYAKEERTAWFEIHTLPNLTVEQMAAFISKLFDDPSQSSELLSEAKKLNDSQAPK

SEQ ID NO: 17 - protein, 58 aa, ARTIFICIAL SEQUENCE
  Engineered IL6 binding polypeptide
VDAKYAKEEAEAWWEIHLLPNLTVSQMAAFISKLFDDPSQSSELLSEAKKLNDSQAPK

SEQ ID NO: 18 - protein, 58 aa, ARTIFICIAL SEQUENCE
  Engineered IL6 binding polypeptide
VDAKYAKEEREAWYEIHLLPNLTVEQMAAFISKLFDDPSQSSELLSEAKKLNDSQAPK

SEQ ID NO: 19 - protein, 58 aa, ARTIFICIAL SEQUENCE
  Engineered IL6 binding polypeptide
VDAKYAKEERDAWYEIHLLPNLTIDQMAAFISKLFDDPSQSSELLSEAKKLNDSQAPK

SEQ ID NO: 20 - protein, 58 aa, ARTIFICIAL SEQUENCE
  Engineered IL6 binding polypeptide
VDAKYAKEERKAWFEIHALPNLTVDQMAAFISKLFDDPSQSSELLSEAKKLNDSQAPK

SEQ ID NO: 21 - protein, 58 aa, ARTIFICIAL SEQUENCE
  Engineered IL6 binding polypeptide
VDAKYAKEEAKAWFEIHALPNLTVEQMAAFISKLFDDPSQSSELLSEAKKLNDSQAPK

SEQ ID NO: 22 - protein, 58 aa, ARTIFICIAL SEQUENCE
  Engineered IL6 binding polypeptide
VDAKYAKEERTAWYEIHILPNLTVSQMAAFISKLFDDPSQSSELLSEAKKLNDSQAPK

SEQ ID NO: 23 - protein, 58 aa, ARTIFICIAL SEQUENCE
  Engineered IL6 binding polypeptide
VDAKYAKEEQQAWTEIHSLPNLTVDQMAAFISKLFDDPSQSSELLSEAKKLNDSQAPK

SEQ ID NO: 24 - protein, 58 aa, ARTIFICIAL SEQUENCE
  Engineered IL6 binding polypeptide
VDAKYAKEERDAWYEIHLLPNLTVEQIAAFISKLFDDPSQSSELLSEAKKLNDSQAPK

SEQ ID NO: 25 - protein, 58 aa, ARTIFICIAL SEQUENCE
  Engineered IL6 binding polypeptide
VDAKYAKEERVAWYEIHLLPNLTITQMAAFISKLFDDPSQSSELLSEAKKLNDSQAPK

SEQ ID NO: 26 - protein, 58 aa, ARTIFICIAL SEQUENCE
  Engineered IL6 binding polypeptide
VDAKYAKEERQAWYEIHLLPNLTVQQMAAFISKLFDDPSQSSELLSEAKKLNDSQAPK

SEQ ID NO: 27 - protein, 58 aa, ARTIFICIAL SEQUENCE
  Engineered IL6 binding polypeptide
VDAKYAKEEASAWFEIHTLPNLTVQQMAAFISKLFDDPSQSSELLSEAKKLNDSQAPK

SEQ ID NO: 28 - protein, 58 aa, ARTIFICIAL SEQUENCE
  Engineered IL6 binding polypeptide
VDAKYAKEEREAWYEIHVLPNLTVDQMAAFISKLFDDPSQSSELLSEAKKLNDSQAPK

SEQ ID NO: 29 - protein, 58 aa, ARTIFICIAL SEQUENCE
  Engineered IL6 binding polypeptide
VDAKYAKEERKAWYEIHLLPNLTVNQMAAFISKLFDDPSQSSELLSEAKKLNDSQAPK

SEQ ID NO: 30 - protein, 58 aa, ARTIFICIAL SEQUENCE
  Engineered IL6 binding polypeptide
VDAKYAKEERKAWYEIHLLPNLTVDQMAAFISKLFDDPSQSSELLSEAKKLNDSQAPK

SEQ ID NO: 31 - protein, 58 aa, ARTIFICIAL SEQUENCE
  Engineered IL6 binding polypeptide
VDAKYAKEEARAWHEIHILPNLTVSQIAAFISKLFDDPSQSSELLSEAKKLNDSQAPK

SEQ ID NO: 32 - protein, 58 aa, ARTIFICIAL SEQUENCE
  Engineered IL6 binding polypeptide
VDAKYAKEERAAWYEIHLLPNLTVDQMAAFISKLFDDPSQSSELLSEAKKLNDSQAPK

SEQ ID NO: 33 - protein, 58 aa, ARTIFICIAL SEQUENCE
  Engineered IL6 binding polypeptide
VDAKYAKEERQAWYEIHTLPNLTAEQMAAFISKLFDDPSQSSELLSEAKKLNDSQAPK

SEQ ID NO: 34 - protein, 58 aa, ARTIFICIAL SEQUENCE
  Engineered IL6 binding polypeptide
VDAKYAKEERQAWFEIHALPNLTVDQMAAFISKLFDDPSQSSELLSEAKKLNDSQAPK

SEQ ID NO: 35 - protein, 58 aa, ARTIFICIAL SEQUENCE
  Engineered IL6 binding polypeptide
VDAKYAKEEARAWREIHLLPNLTVQQMAAFISKLFDDPSQSSELLSEAKKLNDSQAPK

SEQ ID NO: 36 - protein, 58 aa, ARTIFICIAL SEQUENCE
  Engineered IL6 binding polypeptide
VDAKYAKEEAKAWREIHLLPNLTVTQMAAFISKLFDDPSQSSELLSEAKKLNDSQAPK

SEQ ID NO: 37 - protein, 58 aa, ARTIFICIAL SEQUENCE
  Engineered IL6 binding polypeptide
VDAKYAKEEAEAWREIHLLPNLTVNQMAAFISKLFDDPSQSSELLSEAKKLNDSQAPK

SEQ ID NO: 38 - protein, 58 aa, ARTIFICIAL SEQUENCE
  Engineered IL6 binding polypeptide
VDAKYAKEERDAWYEIHLLPNLTVQQMAAFISKLFDDPSQSSELLSEAKKLNDSQAPK

SEQ ID NO: 39 - protein, 58 aa, ARTIFICIAL SEQUENCE
  Engineered IL6 binding polypeptide
VDAKYAKEEREAWYEIHLLPNLTVRQMAAFISKLFDDPSQSSELLSEAKKLNDSQAPK

SEQ ID NO: 40 - protein, 58 aa, ARTIFICIAL SEQUENCE
  Engineered IL6 binding polypeptide
VDAKYAKEEREAWWEIHKLPNLTVNQMAAFISKLFDDPSQSSELLSEAKKLNDSQAPK

SEQ ID NO: 41 - protein, 58 aa, ARTIFICIAL SEQUENCE
  Engineered IL6 binding polypeptide
VDAKYAKEERRAWYEIHLLPNLTIQQMAAFISKLFDDPSQSSELLSEAKKLNDSQAPK

SEQ ID NO: 42 - protein, 58 aa, ARTIFICIAL SEQUENCE
  Engineered IL6 binding polypeptide
VDAKYAKEEAEAWREIHLLPNLTVHQMAAFISKLFDDPSQSSELLSEAKKLNDSQAPK

SEQ ID NO: 43 - protein, 58 aa, ARTIFICIAL SEQUENCE
  Engineered IL6 binding polypeptide
VDAKYAKEERDAWHEIHLLPNLTVSQMAAFISKLFDDPSQSSELLSEAKKLNDSQAPK

SEQ ID NO: 44 - protein, 58 aa, ARTIFICIAL SEQUENCE
  Engineered IL6 binding polypeptide
VDAKYAKEERRAWYEIHTLPNLTVQQMAAFISKLFDDPSQSSELLSEAKKLNDSQAPK

SEQ ID NO: 45 - protein, 58 aa, ARTIFICIAL SEQUENCE
  Engineered IL6 binding polypeptide
VDAKYAKEERKAWFEIHKLPNLTVEQMAAFISKLFDDPSQSSELLSEAKKLNDSQAPK

SEQ ID NO: 46 - protein, 58 aa, ARTIFICIAL SEQUENCE
  Engineered IL6 binding polypeptide
VDAKYAKEEHHAWTEIHLLPNLTVSQMAAFIQKLFDDPSQSSELLSEAKKLNDSQAPK

SEQ ID NO: 47 - protein, 58 aa, ARTIFICIAL SEQUENCE
  Engineered IL6 binding polypeptide
VDAKYAKEEARAWFEIHALPNLTVQQVAAFISKLFDDPSQSSELLSEAKKLNDSQAPK

SEQ ID NO: 48 - protein, 58 aa, ARTIFICIAL SEQUENCE
  Engineered IL6 binding polypeptide
VDAKYAKEEAKAWREIHILPNLTVQQMAAFISKLFDDPSQSSELLSEAKKLNDSQAPK

SEQ ID NO: 49 - protein, 58 aa, ARTIFICIAL SEQUENCE
  Engineered IL6 binding polypeptide
VDAKYAKEEATAWHEIHTLPNLTVHQMAAFISKLFDDPSQSSELLSEAKKLNDSQAPK

SEQ ID NO: 50 - protein, 58 aa, ARTIFICIAL SEQUENCE
  Engineered IL6 binding polypeptide
VDAKYAKEERSAWYEIHLLPNLTVTQMAAFISKLFDDPSQSSELLSEAKKLNDSQAPK

SEQ ID NO: 51 - protein, 58 aa, ARTIFICIAL SEQUENCE
  Engineered IL6 binding polypeptide
VDAKYAKEERAAWFEIHTLPNLTVQQMAAFISKLFDDPSQSSELLSEAKKLNDSQAPK

SEQ ID NO: 52 - protein, 58 aa, ARTIFICIAL SEQUENCE
  Engineered IL6 binding polypeptide
VDAKYAKEERTAWYEIHLLPNLTVTQMAAFISKLFDDPSQSSELLSEAKKLNDSQAPK

SEQ ID NO: 53 - protein, 58 aa, ARTIFICIAL SEQUENCE
  Engineered IL6 binding polypeptide
VDAKYAKEERKAWFEIHALPNLTVSQMAAFISKLFDDPSQSSELLSEAKKLNDSQAPK

SEQ ID NO: 54 - protein, 58 aa, ARTIFICIAL SEQUENCE
  Engineered IL6 binding polypeptide
VDAKYAKEEHRAWFEIHLLPNLTVEQMAAFISKLFDDPSQSSELLSEAKKLNDSQAPK

SEQ ID NO: 55 - protein, 58 aa, ARTIFICIAL SEQUENCE
  Engineered IL6 binding polypeptide
VDAKYAKEERAAWYEIHILPNLTVQQMAAFIQKLFDDPSQSSELLSEAKKLNDSQAPK

SEQ ID NO: 56 - protein, 58 aa, ARTIFICIAL SEQUENCE
  Engineered IL6 binding polypeptide
VDAKYAKEERQAWYEIHLLPNLTVSQIAAFISKLFDDPSQSSELLSEAKKLNDSQAPK

SEQ ID NO: 57 - protein, 58 aa, ARTIFICIAL SEQUENCE
  Engineered IL6 binding polypeptide
VDAKYAKEEAAAWREIHLLPNLTVQQMAAFISKLFDDPSQSSELLSEAKKLNDSQAPK

SEQ ID NO: 58 - protein, 58 aa, ARTIFICIAL SEQUENCE
  Engineered IL6 binding polypeptide
VDAKYAKEEREAWHEIHILPNLTIHQMAAFISKLFDDPSQSSELLSEAKKLNDSQAPK

SEQ ID NO: 59 - protein, 58 aa, ARTIFICIAL SEQUENCE
  Engineered IL6 binding polypeptide
VDAKYAKEEAQAWLEIHLLPNLTVDQIAAFISKLFDDPSQSSELLSEAKKLNDSQAPK

SEQ ID NO: 60 - protein, 58 aa, ARTIFICIAL SEQUENCE
  Engineered IL6 binding polypeptide
VDAKYAKEERKAWFEIHALPNLTVTQMAAFISKLFDDPSQSSELLSEAKKLNDSQAPK

SEQ ID NO: 61 - protein, 58 aa, ARTIFICIAL SEQUENCE
  Engineered IL6 binding polypeptide
VDAKYAKEERDAWYEIHLLPNLTVEQMAAFISKLFDDPSQSSELLSEAKKLNDSQAPK

SEQ ID NO: 62 - protein, 58 aa, ARTIFICIAL SEQUENCE
  Engineered IL6 binding polypeptide
VDAKYAKEEAAAWYEIHLLPNLTISQIAAFISKLFDDPSQSSELLSEAKKLNDSQAPK

SEQ ID NO: 63 - protein, 58 aa, ARTIFICIAL SEQUENCE
  Engineered IL6 binding polypeptide
VDAKYAKEERVAWYEIHLLPNLTVRQMAAFISKLFDDPSQSSELLSEAKKLNDSQAPK

SEQ ID NO: 64 - protein, 58 aa, ARTIFICIAL SEQUENCE
  Engineered IL6 binding polypeptide
VDAKYAKEEHHAWYEIHILPNLTVSQIAAFISKLFDDPSQSSELLSEAKKLNDSQAPK

SEQ ID NO: 65 - protein, 58 aa, ARTIFICIAL SEQUENCE
  Engineered IL6 binding polypeptide
VDAKYAKEERAAWFEIHALPNLTVEQVAAFIIKLFDDPSQSSELLSEAKKLNDSQAPK

SEQ ID NO: 66 - protein, 58 aa, ARTIFICIAL SEQUENCE
  Engineered IL6 binding polypeptide
VDAKYAKEEQEAWYEIHVLPNLTVTQMAAFISKLFDDPSQSSELLSEAKKLNDSQAPK

SEQ ID NO: 67 - protein, 58 aa, ARTIFICIAL SEQUENCE
  Engineered IL6 binding polypeptide
VDAKYAKEEQQAWTEIHTLPNLTVDQMAAFISKLFDDPSQSSELLSEAKKLNDSQAPK

SEQ ID NO: 68 - protein, 58 aa, ARTIFICIAL SEQUENCE
  Engineered IL6 binding polypeptide
VDAKYAKEERDAWYEIHLLPNLTVTQMAAFISKLFDDPSQSSELLSEAKKLNDSQAPK

SEQ ID NO: 69 - protein, 58 aa, ARTIFICIAL SEQUENCE
  Engineered IL6 binding polypeptide
VDAKYAKEERDAWYEIHLLPNLTISQMAAFISKLFDDPSQSSELLSEAKKLNDSQAPK

SEQ ID NO: 70 - protein, 58 aa, ARTIFICIAL SEQUENCE
  Engineered IL6 binding polypeptide
VDAKYAKEEREAWHEIHILPNLTVEQIAAFISKLFDDPSQSSELLSEAKKLNDSQAPK

SEQ ID NO: 71 - protein, 58 aa, ARTIFICIAL SEQUENCE
  Engineered IL6 binding polypeptide
VDAKYAKEERDAWWEIHALPNLTVDQMAAFISKLFDDPSQSSELLSEAKKLNDSQAPK

SEQ ID NO: 72 - protein, 58 aa, ARTIFICIAL SEQUENCE
  Engineered IL6 binding polypeptide
VDAKYAKEEARAWHEIHVLPNLTVSQMAAFIQKLFDDPSQSSELLSEAKKLNDSQAPK

SEQ ID NO: 73 - protein, 58 aa, ARTIFICIAL SEQUENCE
  Engineered IL6 binding polypeptide
VDAKYAKEEAQAWYEIHTLPNLTVEQMAAFIAKLFDDPSQSSELLSEAKKLNDSQAPK

SEQ ID NO: 74 - protein, 58 aa, ARTIFICIAL SEQUENCE
  Engineered IL6 binding polypeptide
VDAKYAKEERSAWWEIHTLPNLTVTQMAAFISKLFDDPSQSSELLSEAKKLNDSQAPK

SEQ ID NO: 75 - protein, 58 aa, ARTIFICIAL SEQUENCE
  Engineered IL6 binding polypeptide
VDAKYAKEEADAWWEIHALPNLTIDQMAAFISKLFDDPSQSSELLSEAKKLNDSQAPK

SEQ ID NO: 76 - protein, 58 aa, ARTIFICIAL SEQUENCE
  Engineered IL6 binding polypeptide
VDAKYAKEEAEAWYEIHLLPNLTVDQMAAFIIKLFDDPSQSSELLSEAKKLNDSQAPK

SEQ ID NO: 77 - protein, 58 aa, ARTIFICIAL SEQUENCE
  Engineered IL6 binding polypeptide
VDAKYAKEERAAWYEIHSLPNLTVDQMAAFISKLFDDPSQSSELLSEAKKLNDSQAPK

SEQ ID NO: 78 - protein, 58 aa, ARTIFICIAL SEQUENCE
  Engineered IL6 binding polypeptide
VDAKYAKEEQQAWLEIHLLPNLTIEQMAAFISKLFDDPSQSSELLSEAKKLNDSQAPK

SEQ ID NO: 79 - protein, 58 aa, ARTIFICIAL SEQUENCE
  Engineered IL6 binding polypeptide
VDAKYAKEERDAWYEIHLLPNLTVHQIAAFISKLFDDPSQSSELLSEAKKLNDSQAPK

SEQ ID NO: 80 - protein, 58 aa, ARTIFICIAL SEQUENCE
  Engineered IL6 binding polypeptide
VDAKYAKEERDAWYEIHTLPNLTVEQMAAFIWKLFDDPSQSSELLSEAKKLNDSQAPK

SEQ ID NO: 81 - protein, 58 aa, ARTIFICIAL SEQUENCE
  Engineered IL6 binding polypeptide
VDAKYAKEEQHAWLEIHKLPNLTVEQIAAFISKLFDDPSQSSELLSEAKKLNDSQAPK

SEQ ID NO: 82 - protein, 58 aa, ARTIFICIAL SEQUENCE
  Engineered IL6 binding polypeptide
VDAKYAKEEAAAWFEIHTLPNLTVDQMAAFISKLFDDPSQSSELLSEAKKLNDSQAPK

SEQ ID NO: 83 - protein, 58 aa, ARTIFICIAL SEQUENCE
  Engineered IL6 binding polypeptide
VDAKYAKEERDAWFEIHTLPNLTVTQMAAFIIKLFDDPSQSSELLSEAKKLNDSQAPK

SEQ ID NO: 84 - protein, 58 aa, ARTIFICIAL SEQUENCE
  Engineered IL6 binding polypeptide
VDAKYAKEERHAWHEIHILPNLTANQIAAFISKLFDDPSQSSELLSEAKKLNDSQAPK

SEQ ID NO: 85 - protein, 58 aa, ARTIFICIAL SEQUENCE
  Engineered IL6 binding polypeptide
VDAKYAKEEREAWFEIHLLPNLTISQMAAFISKLFDDPSQSSELLSEAKKLNDSQAPK

SEQ ID NO: 86 - protein, 58 aa, ARTIFICIAL SEQUENCE
  Engineered IL6 binding polypeptide
VDAKYAKEEAEAWWEIHLLPNLTVQQIAAFISKLFDDPSQSSELLSEAKKLNDSQAPK

SEQ ID NO: 87 - protein, 58 aa, ARTIFICIAL SEQUENCE
  Engineered IL6 binding polypeptide
VDAKYAKEEAHAWYEIHILPNLTVSQMAAFISKLFDDPSQSSELLSEAKKLNDSQAPK

SEQ ID NO: 88 - protein, 58 aa, ARTIFICIAL SEQUENCE
  Engineered IL6 binding polypeptide
VDAKYAKEERDAWYEIHLLPNLTIDQIAAFISKLFDDPSQSSELLSEAKKLNDSQAPK

SEQ ID NO: 89 - protein, 58 aa, ARTIFICIAL SEQUENCE
  Engineered IL6 binding polypeptide
VDAKYAKEEQRAWREIHLLPNLTIEQMSAFISKLFDDPSQSSELLSEAKKLNDSQAPK

SEQ ID NO: 90 - protein, 58 aa, ARTIFICIAL SEQUENCE
  Engineered IL6 binding polypeptide
VDAKYAKEEYDAWMEIHLLPNLTVDQMAAFITKLFDDPSQSSELLSEAKKLNDSQAPK

SEQ ID NO: 91 - protein, 58 aa, ARTIFICIAL SEQUENCE
  Engineered IL6 binding polypeptide
VDAKYAKEEKHAWREIHLLPNLTVEQMAAFITKLFDDPSQSSELLSEAKKLNDSQAPK

SEQ ID NO: 92 - protein, 58 aa, ARTIFICIAL SEQUENCE
  Engineered IL6 binding polypeptide
VDAKYAKEEKKAWTEIHLLPNLTIEQMAAFITKLFDDPSQSSELLSEAKKLNDSQAPK

SEQ ID NO: 93 - protein, 58 aa, ARTIFICIAL SEQUENCE
  Engineered IL6 binding polypeptide
VDAKYAKEERFAWTEIHLLPNLTVDQMAAFITKLFDDPSQSSELLSEAKKLNDSQAPK

SEQ ID NO: 94 - protein, 58 aa, ARTIFICIAL SEQUENCE
  Engineered IL6 binding polypeptide
VDAKYAKEERHAWTEIHLLPNLTIDQMAAFITKLFDDPSQSSELLSEAKKLNDSQAPK

SEQ ID NO: 95 - protein, 58 aa, ARTIFICIAL SEQUENCE
  Engineered IL6 binding polypeptide
VDAKYAKEERAAWFEIHALPNLTVEQVAAFITKLFDDPSQSSELLSEAKKLNDSQAPK

SEQ ID NO: 96 - protein, 58 aa, ARTIFICIAL SEQUENCE
  Engineered IL6 binding polypeptide
VDAKYAKEEKQAWYEIHNLPNLTVDQMAAFISKLFDDPSQSSELLSEAKKLNDSQAPK

SEQ ID NO: 97 - protein, 58 aa, ARTIFICIAL SEQUENCE
  Engineered IL6 binding polypeptide
VDAKYAKEEAQAWWEIHALPNLTVDQVAAFITKLFDDPSQSSELLSEAKKLNDSQAPK

SEQ ID NO: 98 - protein, 58 aa, ARTIFICIAL SEQUENCE
  Engineered IL6 binding polypeptide
VDAKYAKEEYEAWYEIHILPNLTVDQIAAFITKLFDDPSQSSELLSEAKKLNDSQAPK

SEQ ID NO: 99 - protein, 58 aa, ARTIFICIAL SEQUENCE
  Engineered IL6 binding polypeptide
VDAKYAKEEYEAWHEIHILPNLTVDQMAAFITKLFDDPSQSSELLSEAKKLNDSQAPK

SEQ ID NO: 100 - protein, 58 aa, ARTIFICIAL SEQUENCE
  Engineered IL6 binding polypeptide
VDAKYAKEERMAWMEIHLLPNLTVEQMAAFISKLFDDPSQSSELLSEAKKLNDSQAPK

SEQ ID NO: 101 - protein, 58 aa, ARTIFICIAL SEQUENCE
  Engineered IL6 binding polypeptide
VDAKYAKEEYDAWVEIHALPNLTVEQVAAFITKLFDDPSQSSELLSEAKKLNDSQAPK

SEQ ID NO: 102 - protein, 58 aa, ARTIFICIAL SEQUENCE
  Engineered IL6 binding polypeptide
VDAKYAKEEYEAWVEIHKLPNLTIDQMAAFITKLFDDPSQSSELLSEAKKLNDSQAPK

SEQ ID NO: 103 - protein, 58 aa, ARTIFICIAL SEQUENCE
  Engineered IL6 binding polypeptide
VDAKYAKEEYHAWYEIHLLPNLTIDQMAAFITKLFDDPSQSSELLSEAKKLNDSQAPK

SEQ ID NO: 104 - protein, 58 aa, ARTIFICIAL SEQUENCE
  Engineered IL6 binding polypeptide
VDAKYAKEEKDAWYEIHLLPNLTVEQIAAFITKLFDDPSQSSELLSEAKKLNDSQAPK

SEQ ID NO: 105 - protein, 58 aa, ARTIFICIAL SEQUENCE
  Engineered IL6 binding polypeptide
VDAKYAKEEKHAWHEIHILPNLTVEQMAAFITKLFDDPSQSSELLSEAKKLNDSQAPK

SEQ ID NO: 106 - protein, 58 aa, ARTIFICIAL SEQUENCE
  Engineered IL6 binding polypeptide
VDAKYAKEEKAAWFEIHALPNLTVEQVAAFITKLFDDPSQSSELLSEAKKLNDSQAPK

SEQ ID NO: 107 - protein, 58 aa, ARTIFICIAL SEQUENCE
  Engineered IL6 binding polypeptide
VDAKYAKEEYHAWMEIHLLPNLTVSQMAAFITKLFDDPSQSSELLSEAKKLNDSQAPK

SEQ ID NO: 108 - protein, 58 aa, ARTIFICIAL SEQUENCE
  Engineered IL6 binding polypeptide
VDAKYAKEEAFAWKEIHLLPNLTIDQMAAFITKLFDDPSQSSELLSEAKKLNDSQAPK

SEQ ID NO: 109 - protein, 58 aa, ARTIFICIAL SEQUENCE
  Engineered IL6 binding polypeptide
VDAKYAKEEYEAWYEIHLLPNLTVSQIAAFITKLFDDPSQSSELLSEAKKLNDSQAPK

SEQ ID NO: 110 - protein, 58 aa, ARTIFICIAL SEQUENCE
  Engineered IL6 binding polypeptide
VDAKYAKEEYYAWWEIHKLPNLTVDQMAAFITKLFDDPSQSSELLSEAKKLNDSQAPK

SEQ ID NO: 111 - protein, 58 aa, ARTIFICIAL SEQUENCE
  Engineered IL6 binding polypeptide
VDAKYAKEEAVAWKEIHILPNLTVSQMAAFITKLFDDPSQSSELLSEAKKLNDSQAPK

SEQ ID NO: 112 - protein, 58 aa, ARTIFICIAL SEQUENCE
  Engineered IL6 binding polypeptide
VDAKYAKEEKAAWYEIHLLPNLTIEQMAAFISKLFDDPSQSSELLSEAKKLNDSQAPK

SEQ ID NO: 113 - protein, 58 aa, ARTIFICIAL SEQUENCE
  Engineered IL6 binding polypeptide
VDAKYAKEERAAWTEIHLLPNLTVEQMAAFITKLFDDPSQSSELLSEAKKLNDSQAPK

SEQ ID NO: 114 - protein, 58 aa, ARTIFICIAL SEQUENCE
  Engineered IL6 binding polypeptide
VDAKYAKEERMAWYEIHTLPNLTVEQMAAFITKLFDDPSQSSELLSEAKKLNDSQAPK

SEQ ID NO: 115 - protein, 58 aa, ARTIFICIAL SEQUENCE
  Engineered IL6 binding polypeptide
VDAKYAKEEHHAWREIHLLPNLTVDQMAAFITKLFDDPSQSSELLSEAKKLNDSQAPK

SEQ ID NO: 116 - protein, 58 aa, ARTIFICIAL SEQUENCE
  Engineered IL6 binding polypeptide
VDAKYAKEEAKAWMEIHLLPNLTIDQMAAFITKLFDDPSQSSELLSEAKKLNDSQAPK

SEQ ID NO: 117 - protein, 58 aa, ARTIFICIAL SEQUENCE
  Engineered IL6 binding polypeptide
VDAKYAKEEKAAWYEIHLLPNLTVDQIAAFITKLFDDPSQSSELLSEAKKLNDSQAPK

SEQ ID NO: 118 - protein, 58 aa, ARTIFICIAL SEQUENCE
  Engineered IL6 binding polypeptide
VDAKYAKEEKHAWMEIHKLPNLTVDQMAAFITKLFDDPSQSSELLSEAKKLNDSQAPK

SEQ ID NO: 119 - protein, 58 aa, ARTIFICIAL SEQUENCE
  Engineered IL6 binding polypeptide
VDAKYAKEEKAAWNEIHKLPNLTVDQMAAFITKLFDDPSQSSELLSEAKKLNDSQAPK

SEQ ID NO: 120 - protein, 58 aa, ARTIFICIAL SEQUENCE
  Engineered IL6 binding polypeptide
VDAKYAKEERKAWVEIHNLPNLTVDQMAAFITKLFDDPSQSSELLSEAKKLNDSQAPK

SEQ ID NO: 121 - protein, 58 aa, ARTIFICIAL SEQUENCE
  Engineered IL6 binding polypeptide
VDAKYAKEEAIAWHEIHVLPNLTVDQIAAFITKLFDDPSQSSELLSEAKKLNDSQAPK

SEQ ID NO: 122 - protein, 58 aa, ARTIFICIAL SEQUENCE
  Engineered IL6 binding polypeptide
VDAKYAKEEYEAWYEIHLLPNLTIQQMAAFISKLFDDPSQSSELLSEAKKLNDSQAPK

SEQ ID NO: 123 - protein, 58 aa, ARTIFICIAL SEQUENCE
  Engineered IL6 binding polypeptide
VDAKYAKEEYHAWVEIHNLPNLTIDQMAAFITKLFDDPSQSSELLSEAKKLNDSQAPK

SEQ ID NO: 124 - protein, 58 aa, ARTIFICIAL SEQUENCE
  Engineered IL6 binding polypeptide
VDAKYAKEEAFAWREIHLLPNLTIDQMAAFITKLFDDPSQSSELLSEAKKLNDSQAPK

SEQ ID NO: 125 - protein, 58 aa, ARTIFICIAL SEQUENCE
  Engineered IL6 binding polypeptide
VDAKYAKEEKEAWYEIHLLPNLTVSQMAAFITKLFDDPSQSSELLSEAKKLNDSQAPK

SEQ ID NO: 126 - protein, 58 aa, ARTIFICIAL SEQUENCE
  Engineered IL6 binding polypeptide
VDAKYAKEERKAWYEIHLLPNLTIDQMAAFITKLFDDPSQSSELLSEAKKLNDSQAPK

SEQ ID NO: 127 - protein, 58 aa, ARTIFICIAL SEQUENCE
  Engineered IL6 binding polypeptide
VDAKYAKEEYDAWYEIHTLPNLTVDQMAAFISKLFDDPSQSSELLSEAKKLNDSQAPK

SEQ ID NO: 128 - protein, 58 aa, ARTIFICIAL SEQUENCE
  Engineered IL6 binding polypeptide
VDAKYAKEERNAWTEIHLLPNLTIEQMAAFITKLFDDPSQSSELLSEAKKLNDSQAPK

SEQ ID NO: 129 - protein, 58 aa, ARTIFICIAL SEQUENCE
  Engineered IL6 binding polypeptide
VDAKYAKEEYKAWLEIHNLPNLTVDQMAAFITKLFDDPSQSSELLSEAKKLNDSQAPK

SEQ ID NO: 130 - protein, 58 aa, ARTIFICIAL SEQUENCE
  Engineered IL6 binding polypeptide
VDAKYAKEEYEAWMEIHLLPNLTVEQIAAFITKLFDDPSQSSELLSEAKKLNDSQAPK

SEQ ID NO: 131 - protein, 58 aa, ARTIFICIAL SEQUENCE
  Engineered IL6 binding polypeptide
VDAKYAKEERDAWFEIHKLPNLTVDQMAAFITKLFDDPSQSSELLSEAKKLNDSQAPK

SEQ ID NO: 132 - protein, 58 aa, ARTIFICIAL SEQUENCE
  Engineered IL6 binding polypeptide
VDAKYAKEEAYAWKEIHLLPNLTVDQMAAFITKLFDDPSQSSELLSEAKKLNDSQAPK

SEQ ID NO: 133 - protein, 58 aa, ARTIFICIAL SEQUENCE
  Engineered IL6 binding polypeptide
VDAKYAKEEYFAWWEIHKLPNLTVNQMAAFITKLFDDPSQSSELLSEAKKLNDSQAPK

SEQ ID NO: 134 - protein, 58 aa, ARTIFICIAL SEQUENCE
  Engineered IL6 binding polypeptide
VDAKYAKEEKQAWVEIHNLPNLTITQMAAFITKLFDDPSQSSELLSEAKKLNDSQAPK

SEQ ID NO: 135 - protein, 58 aa, ARTIFICIAL SEQUENCE
  Engineered IL6 binding polypeptide
VDAKYAKEEQRAWYEIHILPNLTIDQMAAFITKLFDDPSQSSELLSEAKKLNDSQAPK

SEQ ID NO: 136 - protein, 58 aa, ARTIFICIAL SEQUENCE
  Engineered IL6 binding polypeptide
VDAKYAKEEARAWREIHALPNLTIDQMAAFITKLFDDPSQSSELLSEAKKLNDSQAPK

SEQ ID NO: 137 - protein, 58 aa, ARTIFICIAL SEQUENCE
  Engineered IL6 binding polypeptide
VDAKYAKEERYAWNEIHKLPNLTVDQMAAFITKLFDDPSQSSELLSEAKKLNDSQAPK

SEQ ID NO: 138 - protein, 58 aa, ARTIFICIAL SEQUENCE
  Engineered IL6 binding polypeptide
VDAKYAKEEAKAWYEIHILPNLTVDQIAAFITKLFDDPSQSSELLSEAKKLNDSQAPK

SEQ ID NO: 139 - protein, 58 aa, ARTIFICIAL SEQUENCE
  Engineered IL6 binding polypeptide
VDAKYAKEEARAWHEIHILPNLTIDQMAAFITKLFDDPSQSSELLSEAKKLNDSQAPK

SEQ ID NO: 140 - protein, 58 aa, ARTIFICIAL SEQUENCE
  Engineered IL6 binding polypeptide
VDAKYAKEEKKAWYEIHLLPNLTIEQMAAFITKLFDDPSQSSELLSEAKKLNDSQAPK

SEQ ID NO: 141 - protein, 58 aa, ARTIFICIAL SEQUENCE
  Engineered IL6 binding polypeptide
VDAKYAKEEARAWTEIHLLPNLTVDQMAAFITKLFDDPSQSSELLSEAKKLNDSQAPK

SEQ ID NO: 142 - protein, 58 aa, ARTIFICIAL SEQUENCE
  Engineered IL6 binding polypeptide
VDAKYAKEERSAWMEIHLLPNLTVDQMAAFITKLFDDPSQSSELLSEAKKLNDSQAPK

SEQ ID NO: 143 - protein, 58 aa, ARTIFICIAL SEQUENCE
  Engineered IL6 binding polypeptide
VDAKYAKEEREAWFEIHILPNLTIDQMAAFITKLFDDPSQSSELLSEAKKLNDSQAPK

SEQ ID NO: 144 - protein, 58 aa, ARTIFICIAL SEQUENCE
  Engineered IL6 binding polypeptide
VDAKYAKEEYEAWTEIHLLPNLTIEQMAAFITKLFDDPSQSSELLSEAKKLNDSQAPK

SEQ ID NO: 145 - protein, 58 aa, ARTIFICIAL SEQUENCE
  Engineered IL6 binding polypeptide
VDAKYAKEEYEAWVEIHNLPNLTITQMAAFITKLFDDPSQSSELLSEAKKLNDSQAPK

SEQ ID NO: 146 - protein, 58 aa, ARTIFICIAL SEQUENCE
  Engineered IL6 binding polypeptide
VDAKYAKEEYKAWHEIHILPNLTVDQMAAFITKLFDDPSQSSELLSEAKKLNDSQAPK

SEQ ID NO: 147 - protein, 58 aa, ARTIFICIAL SEQUENCE
  Engineered IL6 binding polypeptide
VDAKYAKEEREAWMEIHLLPNLTIDQMAAFITKLFDDPSQSSELLSEAKKLNDSQAPK

SEQ ID NO: 148 - protein, 58 aa, ARTIFICIAL SEQUENCE
  Engineered IL6 binding polypeptide
VDAKYAKEEYKAWVEIHLLPNLTVDQIAAFITKLFDDPSQSSELLSEAKKLNDSQAPK

SEQ ID NO: 149 - protein, 58 aa, ARTIFICIAL SEQUENCE
  Engineered IL6 binding polypeptide
VDAKYAKEEKIAWYEIHLLPNLTVNQIAAFITKLFDDPSQSSELLSEAKKLNDSQAPK

SEQ ID NO: 150 - protein, 58 aa, ARTIFICIAL SEQUENCE
  Engineered IL6 binding polypeptide
VDAKYAKEEAYAWKEIHLLPNLTIEQMAAFISKLFDDPSQSSELLSEAKKLNDSQAPK

SEQ ID NO: 151 - protein, 58 aa, ARTIFICIAL SEQUENCE
  Engineered IL6 binding polypeptide
VDAKYAKEEQVAWWEISHLPNLTITQVVAFIQKLFDDPSQSSELLSEAKKLNDSQAPK

SEQ ID NO: 152 - protein, 58 aa, ARTIFICIAL SEQUENCE
  Engineered IL6 binding polypeptide
VDAKYAKEEQVAWWEISHLPNLTIEQVVAFIQKLFDDPSQSSELLSEAKKLNDSQAPK

SEQ ID NO: 153 - protein, 58 aa, ARTIFICIAL SEQUENCE
  Engineered IL6 binding polypeptide
VDAKYAKEEREAWYEIHTLPNLTAQQMAAFIVKLYDDPSQSSELLSEAKKLNDSQAPK

SEQ ID NO: 154 - protein, 58 aa, ARTIFICIAL SEQUENCE
  Engineered IL6 binding polypeptide
VDAKYAKEEAQAWLEIHLLPNLTVDQMAAFISKLFDDPSQSSELLSEAKKLNDSQAPK

SEQ ID NO: 155 - protein, 58 aa, ARTIFICIAL SEQUENCE
  Engineered IL6 binding polypeptide
VDAKYAKEERHAWFEIHSLPNLTVNQMSAFISKLFDDPSQSSELLSEAKKLNDSQAPK

SEQ ID NO: 156 - protein, 58 aa, ARTIFICIAL SEQUENCE
  Engineered IL6 binding polypeptide
VDAKYAKEEADAWWEIHALPNLTVDQMAAFISKLFDDPSQSSELLSEAKKLNDSQAPK

SEQ ID NO: 157 - protein, 58 aa, ARTIFICIAL SEQUENCE
  Engineered IL6 binding polypeptide
VDAKYAKEEARAWLEIHALPNLTVTQMAAFIIKLYDDPSQSSELLSEAKKLNDSQAPK

SEQ ID NO: 158 - protein, 58 aa, ARTIFICIAL SEQUENCE
  Engineered IL6 binding polypeptide
VDAKYAKEERRAWTEIHLLPNLTVDQMAAFISKLFDDPSQSSELLSEAKKLNDSQAPK

SEQ ID NO: 159 - protein, 58 aa, ARTIFICIAL SEQUENCE
  Engineered IL6 binding polypeptide
VDAKYAKEERHAWYEIHTLPNLTVTQMSAFIQKLFDDPSQSSELLSEAKKLNDSQAPK

SEQ ID NO: 160 - protein, 58 aa, ARTIFICIAL SEQUENCE
  Engineered IL6 binding polypeptide
VDAKYAKEEAQAWFEIHLLPNLTIDQMAAFISKLFDDPSQSSELLSEAKKLNDSQAPK

SEQ ID NO: 161 - protein, 58 aa, ARTIFICIAL SEQUENCE
  Engineered IL6 binding polypeptide
VDAKYAKEERAAWHEIHVLPNLTVSQMAAFIIKLFDDPSQSSELLSEAKKLNDSQAPK

SEQ ID NO: 162 - protein, 58 aa, ARTIFICIAL SEQUENCE
  Engineered IL6 binding polypeptide
VDAKYAKEEREAWYEIHVLPNLTVHQRAAFISKLFDDPSQSSELLSEAKKLNDSQAPK

SEQ ID NO: 163 - protein, 58 aa, ARTIFICIAL SEQUENCE
  Engineered IL6 binding polypeptide
VDAKYAKEERHAWYEIHLLPNLTVHQIAAFISKLFDDPSQSSELLSEAKKLNDSQAPK

SEQ ID NO: 164 - protein, 58 aa, ARTIFICIAL SEQUENCE
  Engineered IL6 binding polypeptide
VDAKYAKEERHAWFEIHTLPNLTINQRTAFIQKLFDDPSQSSELLSEAKKLNDSQAPK

SEQ ID NO: 165 - protein, 58 aa, ARTIFICIAL SEQUENCE
  Engineered IL6 binding polypeptide
VDAKYAKEERHAWYEIHVLPNLTVSQMAAFIMKLFDDPSQSSELLSEAKKLNDSQAPK

SEQ ID NO: 166 - protein, 58 aa, ARTIFICIAL SEQUENCE
  Engineered IL6 binding polypeptide
VDAKYAKEERDAWLEIHMLPNLTITQVAAFISKLFDDPSQSSELLSEAKKLNDSQAPK

SEQ ID NO: 167 - protein, 58 aa, ARTIFICIAL SEQUENCE
  Engineered IL6 binding polypeptide
VDAKYAKEEARAWHEIHVLPNLTAEQMAAFISKLFDDPSQSSELLSEAKKLNDSQAPK

SEQ ID NO: 168 - protein, 58 aa, ARTIFICIAL SEQUENCE
  Engineered IL6 binding polypeptide
VDAKYAKEEAEAWLEIHLLPNLTVEQITAFISKLFDDPSQSSELLSEAKKLNDSQAPK

SEQ ID NO: 169 - protein, 58 aa, ARTIFICIAL SEQUENCE
  Engineered IL6 binding polypeptide
VDAKYAKEERDAWHEIHLLPNLTVEQRAAFISKLFDDPSQSSELLSEAKKLNDSQAPK

SEQ ID NO: 170 - protein, 58 aa, ARTIFICIAL SEQUENCE
  Engineered IL6 binding polypeptide
VDAKYAKEERKAWTEIHSLPNLTVTQMAAFISKLFDDPSQSSELLSEAKKLNDSQAPK

SEQ ID NO: 171 - protein, 58 aa, ARTIFICIAL SEQUENCE
  Engineered IL6 binding polypeptide
VDAKYAKEERDAWHEIHILPNLTVEQMSAFISKLFDDPSQSSELLSEAKKLNDSQAPK

SEQ ID NO: 172 - protein, 58 aa, ARTIFICIAL SEQUENCE
  Engineered IL6 binding polypeptide
VDAKYAKEEAEAWFEIHALPNLTAEQMAAFISKLFDDPSQSSELLSEAKKLNDSQAPK

SEQ ID NO: 173 - protein, 58 aa, ARTIFICIAL SEQUENCE
  Engineered IL6 binding polypeptide
VDAKYAKEEHQAWWEIHLLPNLTVDQMSAFISKLFDDPSQSSELLSEAKKLNDSQAPK

SEQ ID NO: 174 - protein, 58 aa, ARTIFICIAL SEQUENCE
  Engineered IL6 binding polypeptide
VDAKYAKEERDAWHEIHKLPNLTVNQVAAFISKLFDDPSQSSELLSEAKKLNDSQAPK

SEQ ID NO: 175 - protein, 58 aa, ARTIFICIAL SEQUENCE
  Engineered IL6 binding polypeptide
VDAKYAKEEADAWFEIHLLPNLTVDQIAAFIQKLFDDPSQSSELLSEAKKLNDSQAPK

SEQ ID NO: 176 - protein, 58 aa, ARTIFICIAL SEQUENCE
  Engineered IL6 binding polypeptide
VDAKYAKEERAAWYEIHVLPNLTVEQMAAFIQKLFDDPSQSSELLSEAKKLNDSQAPK

SEQ ID NO: 177 - protein, 58 aa, ARTIFICIAL SEQUENCE
  Engineered IL6 binding polypeptide
VDAKYAKEEHRAWHEIHLLPNLTVNQIAAFISKLFDDPSQSSELLSEAKKLNDSQAPK

SEQ ID NO: 178 - protein, 58 aa, ARTIFICIAL SEQUENCE
  Engineered IL6 binding polypeptide
VDAKYAKEEAVAWHEIHMLPNLTVEQMAAFISKLFDDPSQSSELLSEAKKLNDSQAPK

SEQ ID NO: 179 - protein, 58 aa, ARTIFICIAL SEQUENCE
  Engineered IL6 binding polypeptide
VDAKYAKEEREAWWEIHALPNLTVSQMAAFISKLFDDPSQSSELLSEAKKLNDSQAPK

SEQ ID NO: 180 - protein, 58 aa, ARTIFICIAL SEQUENCE
  Engineered IL6 binding polypeptide
VDAKYAKEERKAWFEIHSLPNLTVDQMSAFISKLFDDPSQSSELLSEAKKLNDSQAPK

SEQ ID NO: 181 - protein, 58 aa, ARTIFICIAL SEQUENCE
  Engineered IL6 binding polypeptide
VDAKYAKEEQRAWWEIHTLPNLTTDQMAAFISKLFDDPSQSSELLSEAKKLNDSQAPK

SEQ ID NO: 182 - protein, 58 aa, ARTIFICIAL SEQUENCE
  Engineered IL6 binding polypeptide
VDAKYAKEERQAWFEIHALPNLTVDQAAAFIIKLYDDPSQSSELLSEAKKLNDSQAPK

SEQ ID NO: 183 - protein, 58 aa, ARTIFICIAL SEQUENCE
  Engineered IL6 binding polypeptide
VDAKYAKEEARAWTEIHALPNLTVDQMAAFIIKLYDDPSQSSELLSEAKKLNDSQAPK

SEQ ID NO: 184 - protein, 58 aa, ARTIFICIAL SEQUENCE
  Engineered IL6 binding polypeptide
VDAKYAKEERRAWHEIHMLPNLTVTQMSAFISKLFDDPSQSSELLSEAKKLNDSQAPK

SEQ ID NO: 185 - protein, 58 aa, ARTIFICIAL SEQUENCE
  Engineered IL6 binding polypeptide
VDAKYAKEEAKAWLEIHKLPNLTVNQMAAFISKLFDDPSQSSELLSEAKKLNDSQAPK

SEQ ID NO: 186 - protein, 58 aa, ARTIFICIAL SEQUENCE
  Engineered IL6 binding polypeptide
VDAKYAKEEREAWHEIHLLPNLTISQIAAFISKLFDDPSQSSELLSEAKKLNDSQAPK

SEQ ID NO: 187 - protein, 58 aa, ARTIFICIAL SEQUENCE
  Engineered IL6 binding polypeptide
VDAKYAKEEQHAWYEIHLLPNLTVTQMAAFISKLFDDPSQSSELLSEAKKLNDSQAPK

SEQ ID NO: 188 - protein, 58 aa, ARTIFICIAL SEQUENCE
  Engineered IL6 binding polypeptide
VDAKYAKEEHKAWFEIHLLPNLTISQMAAFISKLFDDPSQSSELLSEAKKLNDSQAPK

SEQ ID NO: 189 - protein, 58 aa, ARTIFICIAL SEQUENCE
  Engineered IL6 binding polypeptide
VDAKYAKEERRAWYEIHLLPNLTVTQMTAFISKLFDDPSQSSELLSEAKKLNDSQAPK

SEQ ID NO: 190 - protein, 58 aa, ARTIFICIAL SEQUENCE
  Engineered IL6 binding polypeptide
VDAKYAKEERHAWTEIHILPNLTVRQMAAFISKLFDDPSQSSELLSEAKKLNDSQAPK

SEQ ID NO: 191 - protein, 58 aa, ARTIFICIAL SEQUENCE
  Engineered IL6 binding polypeptide
VDAKYAKEERHAWHEIHLLPNLTIQQMAAFISKLFDDPSQSSELLSEAKKLNDSQAPK

SEQ ID NO: 192 - protein, 58 aa, ARTIFICIAL SEQUENCE
  Engineered IL6 binding polypeptide
VDAKYAKEEQHAWTEIHKLPNLTIQQMAAFIQKLFDDPSQSSELLSEAKKLNDSQAPK

SEQ ID NO: 193 - protein, 58 aa, ARTIFICIAL SEQUENCE
  Engineered IL6 binding polypeptide
VDAKYAKEEHRAWTEIHLLPNLTVSQMVAFISKLFDDPSQSSELLSEAKKLNDSQAPK

SEQ ID NO: 194 - protein, 58 aa, ARTIFICIAL SEQUENCE
  Engineered IL6 binding polypeptide
VDAKYAKEEQDAWYEIHVLPNLTVEQLVAFISKLFDDPSQSSELLSEAKKLNDSQAPK

SEQ ID NO: 195 - protein, 58 aa, ARTIFICIAL SEQUENCE
  Engineered IL6 binding polypeptide
VDAKYAKEEREAWHEIHSLPNLTVDQMTAFIIKLMDDPSQSSELLSEAKKLNDSQAPK

SEQ ID NO: 196 - protein, 58 aa, ARTIFICIAL SEQUENCE
  Engineered IL6 binding polypeptide
VDAKYAKEEAAAWFEIHLLPNLTTEQMAAFIMKLFDDPSQSSELLSEAKKLNDSQAPK

SEQ ID NO: 197 - protein, 58 aa, ARTIFICIAL SEQUENCE
  Engineered IL6 binding polypeptide
VDAKYAKEERAAWYEIHILPNLTVRQMAAFISKLFDDPSQSSELLSEAKKLNDSQAPK

SEQ ID NO: 198 - protein, 58 aa, ARTIFICIAL SEQUENCE
  Engineered IL6 binding polypeptide
VDAKYAKEEARAWTEIHALPNLTVDQVTAFIIKLYDDPSQSSELLSEAKKLNDSQAPK

SEQ ID NO: 199 - protein, 58 aa, ARTIFICIAL SEQUENCE
  Engineered IL6 binding polypeptide
VDAKYAKEEQRAWFEIHTLPNLTVDQIEAFISKLFDDPSQSSELLSEAKKLNDSQAPK

SEQ ID NO: 200 - protein, 58 aa, ARTIFICIAL SEQUENCE
  Engineered IL6 binding polypeptide
VDAKYAKEEAAAWHEIHILPNLTVSQMAAFISKLFDDPSQSSELLSEAKKLNDSQAPK

SEQ ID NO: 201 - protein, 58 aa, ARTIFICIAL SEQUENCE
  Engineered IL6 binding polypeptide
VDAKYAKEEAQAWWEIHSLPNLTVEQTSAFIQKLFDDPSQSSELLSEAKKLNDSQAPK

SEQ ID NO: 202 - protein, 58 aa, ARTIFICIAL SEQUENCE
  Engineered IL6 binding polypeptide
VDAKYAKEEREAWHEIHALPNLTIDQRVAFISKLFDDPSQSSELLSEAKKLNDSQAPK

SEQ ID NO: 203 - protein, 58 aa, ARTIFICIAL SEQUENCE
  Engineered IL6 binding polypeptide
VDAKYAKEEREAWYEIHLLPNLTINQMAAFISKLFDDPSQSSELLSEAKKLNDSQAPK

SEQ ID NO: 204 - protein, 58 aa, ARTIFICIAL SEQUENCE
  Engineered IL6 binding polypeptide
VDAKYAKEERDAWYEIHLLPNLTIRQMAAFISKLFDDPSQSSELLSEAKKLNDSQAPK

SEQ ID NO: 205 - protein, 58 aa, ARTIFICIAL SEQUENCE
  Engineered IL6 binding polypeptide
VDAKYAKEEQKAWTEIHLLPNLTVHQIAAFISKLFDDPSQSSELLSEAKKLNDSQAPK

SEQ ID NO: 206 - protein, 58 aa, ARTIFICIAL SEQUENCE
  Engineered IL6 binding polypeptide
VDAKYAKEERAAWREIHLLPNLTTEQRTAFISKLFDDPSQSSELLSEAKKLNDSQAPK

SEQ ID NO: 207 - protein, 58 aa, ARTIFICIAL SEQUENCE
  Engineered IL6 binding polypeptide
VDAKYAKEEQDAWREIHLLPNLTINQIVAFIQKLFDDPSQSSELLSEAKKLNDSQAPK

SEQ ID NO: 208 - protein, 58 aa, ARTIFICIAL SEQUENCE
  Engineered IL6 binding polypeptide
VDAKYAKEEREAWYEIHSLPNLTVTQIAAFISKLFDDPSQSSELLSEAKKLNDSQAPK

SEQ ID NO: 209 - protein, 58 aa, ARTIFICIAL SEQUENCE
  Engineered IL6 binding polypeptide
VDAKYAKEEATAWYEIHILPNLTVDQMAAFISKLFDDPSQSSELLSEAKKLNDSQAPK

SEQ ID NO: 210 - protein, 58 aa, ARTIFICIAL SEQUENCE
  Engineered IL6 binding polypeptide
VDAKYAKEERDAWYEIHKLPNLTANQMAAFISKLFDDPSQSSELLSEAKKLNDSQAPK

SEQ ID NO: 211 - protein, 58 aa, ARTIFICIAL SEQUENCE
  Engineered IL6 binding polypeptide
VDAKYAKEERDAWFEIHALPNLTVHQMTAFIIKLFDDPSQSSELLSEAKKLNDSQAPK

SEQ ID NO: 212 - protein, 58 aa, ARTIFICIAL SEQUENCE
  Engineered IL6 binding polypeptide
VDAKYAKEEREAWSEIHKLPNLTVDQMAAFISKLFDDPSQSSELLSEAKKLNDSQAPK

SEQ ID NO: 213 - protein, 58 aa, ARTIFICIAL SEQUENCE
  Engineered IL6 binding polypeptide
VDAKYAKEEREAWFEIHLLPNLTVDQMAAFISKLFDDPSQSSELLSEAKKLNDSQAPK

SEQ ID NO: 214 - protein, 58 aa, ARTIFICIAL SEQUENCE
  Engineered IL6 binding polypeptide
VDAKYAKEERKAWYEIHLLPNLTVQQMAAFISKLFDDPSQSSELLSEAKKLNDSQAPK

SEQ ID NO: 215 - protein, 58 aa, ARTIFICIAL SEQUENCE
  Engineered IL6 binding polypeptide
VDAKYAKEEREAWYEIHSLPNLTVNQVAAFIQKLFDDPSQSSELLSEAKKLNDSQAPK

SEQ ID NO: 216 - protein, 58 aa, ARTIFICIAL SEQUENCE
  Engineered IL6 binding polypeptide
VDAKYAKEERHAWREIHLLPNLTTEQRVAFIIKLFDDPSQSSELLSEAKKLNDSQAPK

SEQ ID NO: 217 - protein, 58 aa, ARTIFICIAL SEQUENCE
  Engineered IL6 binding polypeptide
VDAKYAKEEREAWTEIHSLPNLTVDQVTAFISKLFDDPSQSSELLSEAKKLNDSQAPK

SEQ ID NO: 218 - protein, 58 aa, ARTIFICIAL SEQUENCE
  Engineered IL6 binding polypeptide
VDAKYAKEERDAWWEIHLLPNLTVNQISAFISKLFDDPSQSSELLSEAKKLNDSQAPK

SEQ ID NO: 219 - protein, 58 aa, ARTIFICIAL SEQUENCE
  Engineered IL6 binding polypeptide
VDAKYAKEEHHAWREIHLLPNLTVEQMAAFISKLFDDPSQSSELLSEAKKLNDSQAPK

SEQ ID NO: 220 - protein, 58 aa, ARTIFICIAL SEQUENCE
  Engineered IL6 binding polypeptide
VDAKYAKEEQQAWHEIHLLPNLTVDQMAAFISKLFDDPSQSSELLSEAKKLNDSQAPK

SEQ ID NO: 221 - protein, 58 aa, ARTIFICIAL SEQUENCE
  Engineered IL6 binding polypeptide
VDAKYAKEEAQAWHEIHLLPNLTIHQMSAFISKLFDDPSQSSELLSEAKKLNDSQAPK

SEQ ID NO: 222 - protein, 58 aa, ARTIFICIAL SEQUENCE
  Engineered IL6 binding polypeptide
VDAKYAKEEAKAWWEIHVLPNLTIDQIAAFISKLFDDPSQSSELLSEAKKLNDSQAPK

SEQ ID NO: 223 - protein, 58 aa, ARTIFICIAL SEQUENCE
  Engineered IL6 binding polypeptide
VDAKYAKEEAQAWHEIHTLPNLTTEQMAAFISKLFDDPSQSSELLSEAKKLNDSQAPK

SEQ ID NO: 224 - protein, 58 aa, ARTIFICIAL SEQUENCE
  Engineered IL6 binding polypeptide
VDAKYAKEERDAWSEIHSLPNLTISQMAAFISKLFDDPSQSSELLSEAKKLNDSQAPK

SEQ ID NO: 225 - protein, 58 aa, ARTIFICIAL SEQUENCE
  Engineered IL6 binding polypeptide
VDAKYAKEERKAWHEIHILPNLTAEQLAAFISKLFDDPSQSSELLSEAKKLNDSQAPK

SEQ ID NO: 226 - protein, 58 aa, ARTIFICIAL SEQUENCE
  Engineered IL6 binding polypeptide
VDAKYAKEEADAWREIHVLPNLTTQQITAFIQKLFDDPSQSSELLSEAKKLNDSQAPK

SEQ ID NO: 227 - protein, 58 aa, ARTIFICIAL SEQUENCE
  Engineered IL6 binding polypeptide
VDAKYAKEERSAWTEIHMLPNLTVQQRAAFISKLFDDPSQSSELLSEAKKLNDSQAPK

SEQ ID NO: 228 - protein, 58 aa, ARTIFICIAL SEQUENCE
  Engineered IL6 binding polypeptide
VDAKYAKEEREAWYEIHLLPNLTIDQMSAFISKLFDDPSQSSELLSEAKKLNDSQAPK

SEQ ID NO: 229 - protein, 58 aa, ARTIFICIAL SEQUENCE
  Engineered IL6 binding polypeptide
VDAKYAKEEREAWYEIHLLPNLTVEQIVAFISKLFDDPSQSSELLSEAKKLNDSQAPK

SEQ ID NO: 230 - protein, 58 aa, ARTIFICIAL SEQUENCE
  Engineered IL6 binding polypeptide
VDAKYAKEERKAWFEIHSLPNLTVNQMAAFIQKLFDDPSQSSELLSEAKKLNDSQAPK

SEQ ID NO: 231 - protein, 58 aa, ARTIFICIAL SEQUENCE
  Engineered IL6 binding polypeptide
VDAKYAKEEADAWFEIHLLPNLTIDQVSAFISKLFDDPSQSSELLSEAKKLNDSQAPK

SEQ ID NO: 232 - protein, 58 aa, ARTIFICIAL SEQUENCE
  Engineered IL6 binding polypeptide
VDAKYAKEERDAWFEIHLLPNLTIEQMAAFISKLFDDPSQSSELLSEAKKLNDSQAPK

SEQ ID NO: 233 - protein, 58 aa, ARTIFICIAL SEQUENCE
  Engineered IL6 binding polypeptide
VDAKYAKEEADAWREIHTLPNLTVDQMSAFISKLFDDPSQSSELLSEAKKLNDSQAPK

SEQ ID NO: 234 - protein, 58 aa, ARTIFICIAL SEQUENCE
  Engineered IL6 binding polypeptide
VDAKYAKEERVAWYEIHMLPNLTINQMAAFISKLFDDPSQSSELLSEAKKLNDSQAPK

SEQ ID NO: 235 - protein, 58 aa, ARTIFICIAL SEQUENCE
  Engineered IL6 binding polypeptide
VDAKYAKEERDAWYEIHLLPNLTVNQMAAFISKLFDDPSQSSELLSEAKKLNDSQAPK

SEQ ID NO: 236 - protein, 58 aa, ARTIFICIAL SEQUENCE
  Engineered IL6 binding polypeptide
VDAKYAKEERDAWWEIHSLPNLTTQQMAAFIIKLYDDPSQSSELLSEAKKLNDSQAPK

SEQ ID NO: 237 - protein, 58 aa, ARTIFICIAL SEQUENCE
  Engineered IL6 binding polypeptide
VDAKYAKEEARAWHEIHTLPNLTIEQMAAFISKLFDDPSQSSELLSEAKKLNDSQAPK

SEQ ID NO: 238 - protein, 58 aa, ARTIFICIAL SEQUENCE
  Engineered IL6 binding polypeptide
VDAKYAKEERAAWYEIHLLPNLTVEQTAAFISKLFDDPSQSSELLSEAKKLNDSQAPK

SEQ ID NO: 239 - protein, 58 aa, ARTIFICIAL SEQUENCE
  Engineered IL6 binding polypeptide
VDAKYAKEEREAWYEIHLLPNLTVEQIAAFISKLFDDPSQSSELLSEAKKLNDSQAPK

SEQ ID NO: 240 - protein, 58 aa, ARTIFICIAL SEQUENCE
  Engineered IL6 binding polypeptide
VDAKYAKEEQHAWREIHLLPNLTTDQMAAFIQKLFDDPSQSSELLSEAKKLNDSQAPK

SEQ ID NO: 241 - protein, 58 aa, ARTIFICIAL SEQUENCE
  Engineered IL6 binding polypeptide
VDAKYAKEEASAWWEIHLLPNLTTTQRAAFISKLFDDPSQSSELLSEAKKLNDSQAPK

SEQ ID NO: 242 - protein, 58 aa, ARTIFICIAL SEQUENCE
  Engineered IL6 binding polypeptide
VDAKYAKEEATAWYEIHALPNLTVDQMVAFISKLFDDPSQSSELLSEAKKLNDSQAPK

SEQ ID NO: 243 - protein, 58 aa, ARTIFICIAL SEQUENCE
  Engineered IL6 binding polypeptide
VDAKYAKEEHKAWTEIHLLPNLTVSQISAFISKLFDDPSQSSELLSEAKKLNDSQAPK

SEQ ID NO: 244 - protein, 58 aa, ARTIFICIAL SEQUENCE
  Engineered IL6 binding polypeptide
VDAKYAKEEQAAWREIHTLPNLTIEQIAAFISKLFDDPSQSSELLSEAKKLNDSQAPK

SEQ ID NO: 245 - protein, 58 aa, ARTIFICIAL SEQUENCE
  Engineered IL6 binding polypeptide
VDAKYAKEERAAWFEIHTLPNLTVNQMAAFISKLFDDPSQSSELLSEAKKLNDSQAPK

SEQ ID NO: 246 - protein, 58 aa, ARTIFICIAL SEQUENCE
  Engineered IL6 binding polypeptide
VDAKYAKEEAAAWFEIHALPNLTVNQMAAFISKLFDDPSQSSELLSEAKKLNDSQAPK

SEQ ID NO: 247 - protein, 58 aa, ARTIFICIAL SEQUENCE
  Engineered IL6 binding polypeptide
VDAKYAKEEAKAWFEIHKLPNLTAEQISAFIIKLFDDPSQSSELLSEAKKLNDSQAPK

SEQ ID NO: 248 - protein, 58 aa, ARTIFICIAL SEQUENCE
  Engineered IL6 binding polypeptide
VDAKYAKEEREAWYEIHLLPNLTVQQIVAFIIKLFDDPSQSSELLSEAKKLNDSQAPK

SEQ ID NO: 249 - protein, 58 aa, ARTIFICIAL SEQUENCE
  Engineered IL6 binding polypeptide
VDAKYAKEEQQAWYEIHLLPNLTIEQMAAFISKLFDDPSQSSELLSEAKKLNDSQAPK

SEQ ID NO: 250 - protein, 58 aa, ARTIFICIAL SEQUENCE
  Engineered IL6 binding polypeptide
VDAKYAKEERDAWFEIHSLPNLTVDQMVAFISKLFDDPSQSSELLSEAKKLNDSQAPK

SEQ ID NO: 251 - protein, 58 aa, ARTIFICIAL SEQUENCE
  Engineered IL6 binding polypeptide
VDAKYAKEEAEAWFEIHTLPNLTVQQMAAFISKLFDDPSQSSELLSEAKKLNDSQAPK

SEQ ID NO: 252 - protein, 58 aa, ARTIFICIAL SEQUENCE
  Engineered IL6 binding polypeptide
VDAKYAKEEQKAWHEIHKLPNLTVDQTTAFISKLFDDPSQSSELLSEAKKLNDSQAPK

SEQ ID NO: 253 - protein, 58 aa, ARTIFICIAL SEQUENCE
  Engineered IL6 binding polypeptide
VDAKYAKEEREAWYEIHLLPNLTIEQMVAFISKLFDDPSQSSELLSEAKKLNDSQAPK

SEQ ID NO: 254 - protein, 58 aa, ARTIFICIAL SEQUENCE
  Engineered IL6 binding polypeptide
VDAKYAKEEAEAWFEIHTLPNLTVDQMAAFIVKLYDDPSQSSELLSEAKKLNDSQAPK

SEQ ID NO: 255 - protein, 58 aa, ARTIFICIAL SEQUENCE
  Engineered IL6 binding polypeptide
VDAKYAKEEAEAWFEIHTLPNLTVTQIAAFISKLFDDPSQSSELLSEAKKLNDSQAPK

SEQ ID NO: 256 - protein, 58 aa, ARTIFICIAL SEQUENCE
  Engineered IL6 binding polypeptide
VDAKYAKEERQAWYEIHALPNLTADQMAAFIQKLFDDPSQSSELLSEAKKLNDSQAPK

SEQ ID NO: 257 - protein, 58 aa, ARTIFICIAL SEQUENCE
  Engineered IL6 binding polypeptide
VDAKYAKEEQSAWYEIHALPNLTVQQMEAFISKLFDDPSQSSELLSEAKKLNDSQAPK

SEQ ID NO: 258 - protein, 58 aa, ARTIFICIAL SEQUENCE
  Engineered IL6 binding polypeptide
VDAKYAKEEADAWLEIHLLPNLTVEQMAAFISKLFDDPSQSSELLSEAKKLNDSQAPK

SEQ ID NO: 259 - protein, 58 aa, ARTIFICIAL SEQUENCE
  Engineered IL6 binding polypeptide
VDAKYAKEEQQAWWEIHTLPNLTVDQRSAFIVKLYDDPSQSSELLSEAKKLNDSQAPK

SEQ ID NO: 260 - protein, 58 aa, ARTIFICIAL SEQUENCE
  Engineered IL6 binding polypeptide
VDAKYAKEERKAWHEIHILPNLTVNQISAFIQKLFDDPSQSSELLSEAKKLNDSQAPK

SEQ ID NO: 261 - protein, 58 aa, ARTIFICIAL SEQUENCE
  Engineered IL6 binding polypeptide
VDAKYAKEEAHAWWEIHKLPNLTTDQTAAFISKLFDDPSQSSELLSEAKKLNDSQAPK

SEQ ID NO: 262 - protein, 58 aa, ARTIFICIAL SEQUENCE
  Engineered IL6 binding polypeptide
VDAKYAKEERDAWYEIHILPNLTVTQMAAFISKLFDDPSQSSELLSEAKKLNDSQAPK

SEQ ID NO: 263 - protein, 58 aa, ARTIFICIAL SEQUENCE
  Engineered IL6 binding polypeptide
VDAKYAKEEAQAWREIHTLPNLTAQQMAAFISKLFDDPSQSSELLSEAKKLNDSQAPK

SEQ ID NO: 264 - protein, 58 aa, ARTIFICIAL SEQUENCE
  Engineered IL6 binding polypeptide
VDAKYAKEERRAWHEIHVLPNLTVEQMAAFISKLFDDPSQSSELLSEAKKLNDSQAPK

SEQ ID NO: 265 - protein, 58 aa, ARTIFICIAL SEQUENCE
  Engineered IL6 binding polypeptide
VDAKYAKEEREAWSEIHLLPNLTVTQMAAFISKLFDDPSQSSELLSEAKKLNDSQAPK

SEQ ID NO: 266 - protein, 58 aa, ARTIFICIAL SEQUENCE
  Engineered IL6 binding polypeptide
VDAKYAKEERKAWYEIHLLPNLTVSQMAAFISKLFDDPSQSSELLSEAKKLNDSQAPK

SEQ ID NO: 267 - protein, 58 aa, ARTIFICIAL SEQUENCE
  Engineered IL6 binding polypeptide
VDAKYAKEEARAWYEIHLLPNLTVTQMAAFISKLFDDPSQSSELLSEAKKLNDSQAPK

SEQ ID NO: 268 - protein, 58 aa, ARTIFICIAL SEQUENCE
  Engineered IL6 binding polypeptide
VDAKYAKEEHEAWTEIHKLPNLTTEQMAAFISKLFDDPSQSSELLSEAKKLNDSQAPK

SEQ ID NO: 269 - protein, 58 aa, ARTIFICIAL SEQUENCE
  Engineered IL6 binding polypeptide
VDAKYAKEERDAWFEIHSLPNLTVQQMAAFISKLFDDPSQSSELLSEAKKLNDSQAPK

SEQ ID NO: 270 - protein, 58 aa, ARTIFICIAL SEQUENCE
  Engineered IL6 binding polypeptide
VDAKYAKEEQSAWHEIHLLPNLTVDQIAAFISKLFDDPSQSSELLSEAKKLNDSQAPK

SEQ ID NO: 271 - protein, 58 aa, ARTIFICIAL SEQUENCE
  Engineered IL6 binding polypeptide
VDAKYAKEEQAAWYEIHALPNLTVDQMTAFISKLFDDPSQSSELLSEAKKLNDSQAPK

SEQ ID NO: 272 - protein, 58 aa, ARTIFICIAL SEQUENCE
  Engineered IL6 binding polypeptide
VDAKYAKEEAAAWREIHLLPNLTTQQMAAFISKLFDDPSQSSELLSEAKKLNDSQAPK

SEQ ID NO: 273 - protein, 58 aa, ARTIFICIAL SEQUENCE
  Engineered IL6 binding polypeptide
VDAKYAKEEREAWYEIHILPNLTVEQMAAFISKLFDDPSQSSELLSEAKKLNDSQAPK

SEQ ID NO: 274 - protein, 58 aa, ARTIFICIAL SEQUENCE
  Engineered IL6 binding polypeptide
VDAKYAKEERKAWYEIHTLPNLTVDQMAAFISKLFDDPSQSSELLSEAKKLNDSQAPK

SEQ ID NO: 275 - protein, 58 aa, ARTIFICIAL SEQUENCE
  Engineered IL6 binding polypeptide
VDAKYAKEEAKAWREIHLLPNLTVEQMAAFISKLFDDPSQSSELLSEAKKLNDSQAPK

SEQ ID NO: 276 - protein, 58 aa, ARTIFICIAL SEQUENCE
  Engineered IL6 binding polypeptide
VDAKYAKEEAQAWSEIHMLPNLTVTQIAAFISKLFDDPSQSSELLSEAKKLNDSQAPK

SEQ ID NO: 277 - protein, 58 aa, ARTIFICIAL SEQUENCE
  Engineered IL6 binding polypeptide
VDAKYAKEEAHAWHEIHILPNLTVDQMSAFISKLFDDPSQSSELLSEAKKLNDSQAPK

SEQ ID NO: 278 - protein, 58 aa, ARTIFICIAL SEQUENCE
  Engineered IL6 binding polypeptide
VDAKYAKEEREAWFEIHLLPNLTVEQIAAFISKLFDDPSQSSELLSEAKKLNDSQAPK

SEQ ID NO: 279 - protein, 58 aa, ARTIFICIAL SEQUENCE
  Engineered IL6 binding polypeptide
VDAKYAKEERKAWWEIHLLPNLTIEQMAAFISKLFDDPSQSSELLSEAKKLNDSQAPK

SEQ ID NO: 280 - protein, 58 aa, ARTIFICIAL SEQUENCE
  Engineered IL6 binding polypeptide
VDAKYAKEERDAWYEIHTLPNLTVEQMVAFISKLFDDPSQSSELLSEAKKLNDSQAPK

SEQ ID NO: 281 - protein, 58 aa, ARTIFICIAL SEQUENCE
  Engineered IL6 binding polypeptide
VDAKYAKEERKAWYEIHALPNLTVSQMAAFIIKLYDDPSQSSELLSEAKKLNDSQAPK

SEQ ID NO: 282 - protein, 58 aa, ARTIFICIAL SEQUENCE
  Engineered IL6 binding polypeptide
VDAKYAKEEHKAWWEIHALPNLTISQITAFISKLFDDPSQSSELLSEAKKLNDSQAPK

SEQ ID NO: 283 - protein, 58 aa, ARTIFICIAL SEQUENCE
  Engineered IL6 binding polypeptide
VDAKYAKEEAQAWYEIHLLPNLTIEQMAAFISKLFDDPSQSSELLSEAKKLNDSQAPK

SEQ ID NO: 284 - protein, 58 aa, ARTIFICIAL SEQUENCE
  Engineered IL6 binding polypeptide
VDAKYAKEEQDAWWEIHALPNLTIDQMAAFISKLFDDPSQSSELLSEAKKLNDSQAPK

SEQ ID NO: 285 - protein, 58 aa, ARTIFICIAL SEQUENCE
  Engineered IL6 binding polypeptide
VDAKYAKEEHDAWWEIHILPNLTVEQIAAFISKLFDDPSQSSELLSEAKKLNDSQAPK

SEQ ID NO: 286 - protein, 58 aa, ARTIFICIAL SEQUENCE
  Engineered IL6 binding polypeptide
VDAKYAKEEARAWLEIHTLPNLTITQRAAFISKLFDDPSQSSELLSEAKKLNDSQAPK

SEQ ID NO: 287 - protein, 58 aa, ARTIFICIAL SEQUENCE
  Engineered IL6 binding polypeptide
VDAKYAKEERKAWHEIHILPNLTINQRAAFISKLFDDPSQSSELLSEAKKLNDSQAPK

SEQ ID NO: 288 - protein, 58 aa, ARTIFICIAL SEQUENCE
  Engineered IL6 binding polypeptide
VDAKYAKEEREAWYEIHMLPNLTVTQMAAFISKLFDDPSQSSELLSEAKKLNDSQAPK

SEQ ID NO: 289 - protein, 58 aa, ARTIFICIAL SEQUENCE
  Engineered IL6 binding polypeptide
VDAKYAKEERDAWFEIHILPNLTIHQMAAFISKLFDDPSQSSELLSEAKKLNDSQAPK

SEQ ID NO: 290 - protein, 58 aa, ARTIFICIAL SEQUENCE
  Engineered IL6 binding polypeptide
VDAKYAKEEHDAWYEIHTLPNLTVDQMVAFISKLFDDPSQSSELLSEAKKLNDSQAPK

SEQ ID NO: 291 - protein, 58 aa, ARTIFICIAL SEQUENCE
  Engineered IL6 binding polypeptide
VDAKYAKEEAQAWYEIHTLPNLTVDQMAAFISKLFDDPSQSSELLSEAKKLNDSQAPK

SEQ ID NO: 292 - protein, 58 aa, ARTIFICIAL SEQUENCE
  Engineered IL6 binding polypeptide
VDAKYAKEERVAWWEIHSLPNLTIDQRSAFISKLFDDPSQSSELLSEAKKLNDSQAPK

SEQ ID NO: 293 - protein, 58 aa, ARTIFICIAL SEQUENCE
  Engineered IL6 binding polypeptide
VDAKYAKEEHEAWTEIHLLPNLTVSQIAAFISKLFDDPSQSSELLSEAKKLNDSQAPK

SEQ ID NO: 294 - protein, 58 aa, ARTIFICIAL SEQUENCE
  Engineered IL6 binding polypeptide
VDAKYAKEEAQAWREIHLLPNLTVDQIAAFISKLFDDPSQSSELLSEAKKLNDSQAPK

SEQ ID NO: 295 - protein, 58 aa, ARTIFICIAL SEQUENCE
  Engineered IL6 binding polypeptide
VDAKYAKEERDAWHEIHVLPNLTAEQMSAFISKLFDDPSQSSELLSEAKKLNDSQAPK

SEQ ID NO: 296 - protein, 58 aa, ARTIFICIAL SEQUENCE
  Engineered IL6 binding polypeptide
VDAKYAKEEATAWFEIHTLPNLTVDQMAAFIIKLFDDPSQSSELLSEAKKLNDSQAPK

SEQ ID NO: 297 - protein, 58 aa, ARTIFICIAL SEQUENCE
  Engineered IL6 binding polypeptide
VDAKYAKEERHAWFEIHTLPNLTVTQMAAFISKLFDDPSQSSELLSEAKKLNDSQAPK

SEQ ID NO: 298 - protein, 58 aa, ARTIFICIAL SEQUENCE
  Engineered IL6 binding polypeptide
VDAKYAKEEREAWWEIHALPNLTTNQVAAFISKLFDDPSQSSELLSEAKKLNDSQAPK

SEQ ID NO: 299 - protein, 58 aa, ARTIFICIAL SEQUENCE
  Engineered IL6 binding polypeptide
VDAKYAKEERRAWWEIHLLPNLTIQQIAAFISKLFDDPSQSSELLSEAKKLNDSQAPK

SEQ ID NO: 300 - protein, 58 aa, ARTIFICIAL SEQUENCE
  Engineered IL6 binding polypeptide
VDAKYAKEEAHAWFEIHILPNLTIDQMAAFISKLFDDPSQSSELLSEAKKLNDSQAPK

SEQ ID NO: 301 - protein, 58 aa, ARTIFICIAL SEQUENCE
  Engineered IL6 binding polypeptide
VDAKYAKEEARAWREIHLLPNLTVEQMAAFISKLFDDPSQSSELLSEAKKLNDSQAPK

SEQ ID NO: 302 - protein, 58 aa, ARTIFICIAL SEQUENCE
  Engineered IL6 binding polypeptide
VDAKYAKEERRAWYEIHTLPNLTVEQLSAFISKLFDDPSQSSELLSEAKKLNDSQAPK

SEQ ID NO: 303 - protein, 58 aa, ARTIFICIAL SEQUENCE
  Engineered IL6 binding polypeptide
VDAKYAKEEAHAWHEIHVLPNLTVEQIAAFISKLFDDPSQSSELLSEAKKLNDSQAPK

SEQ ID NO: 304 - protein, 58 aa, ARTIFICIAL SEQUENCE
  Engineered IL6 binding polypeptide
VDAKYAKEEREAWFEIHTLPNLTVEQMAAFISKLFDDPSQSSELLSEAKKLNDSQAPK

SEQ ID NO: 305 - protein, 58 aa, ARTIFICIAL SEQUENCE
  Engineered IL6 binding polypeptide
VDAKYAKEERDAWWEIHSLPNLTIDQMAAFISKLFDDPSQSSELLSEAKKLNDSQAPK

SEQ ID NO: 306 - protein, 58 aa, ARTIFICIAL SEQUENCE
  Engineered IL6 binding polypeptide
VDAKYAKEEARAWHEIHILPNLTIQQITAFIQKLFDDPSQSSELLSEAKKLNDSQAPK

SEQ ID NO: 307 - protein, 58 aa, ARTIFICIAL SEQUENCE
  Engineered IL6 binding polypeptide
VDAKYAKEEQKAWHEIHLLPNLTINQIVAFISKLFDDPSQSSELLSEAKKLNDSQAPK

SEQ ID NO: 308 - protein, 58 aa, ARTIFICIAL SEQUENCE
  Engineered IL6 binding polypeptide
VDAKYAKEEREAWYEIHILPNLTVNQVAAFISKLFDDPSQSSELLSEAKKLNDSQAPK

SEQ ID NO: 309 - protein, 58 aa, ARTIFICIAL SEQUENCE
  Engineered IL6 binding polypeptide
VDAKYAKEERVAWYEIHALPNLTVTQMAAFISKLFDDPSQSSELLSEAKKLNDSQAPK

SEQ ID NO: 310 - protein, 58 aa, ARTIFICIAL SEQUENCE
  Engineered IL6 binding polypeptide
VDAKYAKEERVAWLEIHALPNLTVDQMAAFIIKLFDDPSQSSELLSEAKKLNDSQAPK

SEQ ID NO: 311 - protein, 58 aa, ARTIFICIAL SEQUENCE
  Engineered IL6 binding polypeptide
VDAKYAKEERDAWFEIHMLPNLTVNQMAAFIIKLFDDPSQSSELLSEAKKLNDSQAPK

SEQ ID NO: 312 - protein, 58 aa, ARTIFICIAL SEQUENCE
  Engineered IL6 binding polypeptide
VDAKYAKEEAVAWFEIHTLPNLTVEQMAAFIVKLFDDPSQSSELLSEAKKLNDSQAPK

SEQ ID NO: 313 - protein, 58 aa, ARTIFICIAL SEQUENCE
  Engineered IL6 binding polypeptide
VDAKYAKEEQDAWSEIHLLPNLTVNQMAAFISKLFDDPSQSSELLSEAKKLNDSQAPK

SEQ ID NO: 314 - protein, 58 aa, ARTIFICIAL SEQUENCE
  Engineered IL6 binding polypeptide
VDAKYAKEERDAWWEIHALPNLTVDQMVAFISKLFDDPSQSSELLSEAKKLNDSQAPK

SEQ ID NO: 315 - protein, 58 aa, ARTIFICIAL SEQUENCE
  Engineered IL6 binding polypeptide
VDAKYAKEEAHAWHEIHVLPNLTVHQVAAFISKLFDDPSQSSELLSEAKKLNDSQAPK

SEQ ID NO: 316 - protein, 58 aa, ARTIFICIAL SEQUENCE
  Engineered IL6 binding polypeptide
VDAKYAKEEREAWYEIHLLPNLTAEQMAAFISKLFDDPSQSSELLSEAKKLNDSQAPK

SEQ ID NO: 317 - protein, 58 aa, ARTIFICIAL SEQUENCE
  Engineered IL6 binding polypeptide
VDAKYAKEEQEAWYEIHILPNLTISQMAAFISKLFDDPSQSSELLSEAKKLNDSQAPK

SEQ ID NO: 318 - protein, 58 aa, ARTIFICIAL SEQUENCE
  Engineered IL6 binding polypeptide
VDAKYAKEERDAWYEIHTLPNLTVEQMAAFISKLFDDPSQSSELLSEAKKLNDSQAPK

SEQ ID NO: 319 - protein, 58 aa, ARTIFICIAL SEQUENCE
  Engineered IL6 binding polypeptide
VDAKYAKEERQAWTEIHLLPNLTVTQMAAFISKLFDDPSQSSELLSEAKKLNDSQAPK

SEQ ID NO: 320 - protein, 58 aa, ARTIFICIAL SEQUENCE
  Engineered IL6 binding polypeptide
VDAKYAKEERDAWLEIHLLPNLTVEQMAAFISKLFDDPSQSSELLSEAKKLNDSQAPK

SEQ ID NO: 321 - protein, 58 aa, ARTIFICIAL SEQUENCE
  Engineered IL6 binding polypeptide
VDAKYAKEEQRAWTEIHTLPNLTVDQMAAFISKLFDDPSQSSELLSEAKKLNDSQAPK

SEQ ID NO: 322 - protein, 58 aa, ARTIFICIAL SEQUENCE
  Engineered IL6 binding polypeptide
VDAKYAKEERKAWWEIHLLPNLTVDQITAFISKLFDDPSQSSELLSEAKKLNDSQAPK

SEQ ID NO: 323 - protein, 58 aa, ARTIFICIAL SEQUENCE
  Engineered IL6 binding polypeptide
VDAKYAKEEARAWHEIHILPNLTVDQIAAFISKLFDDPSQSSELLSEAKKLNDSQAPK

SEQ ID NO: 324 - protein, 58 aa, ARTIFICIAL SEQUENCE
  Engineered IL6 binding polypeptide
VDAKYAKEEREAWHEIHILPNLTVTQMAAFISKLFDDPSQSSELLSEAKKLNDSQAPK

SEQ ID NO: 325 - protein, 58 aa, ARTIFICIAL SEQUENCE
  Engineered IL6 binding polypeptide
VDAKYAKEEQDAWWEIHKLPNLTTHQVAAFISKLFDDPSQSSELLSEAKKLNDSQAPK

SEQ ID NO: 326 - protein, 58 aa, ARTIFICIAL SEQUENCE
  Engineered IL6 binding polypeptide
VDAKYAKEERRAWFEIHALPNLTTEQMAAFIWKLFDDPSQSSELLSEAKKLNDSQAPK

SEQ ID NO: 327 - protein, 58 aa, ARTIFICIAL SEQUENCE
  Engineered IL6 binding polypeptide
VDAKYAKEEAAAWFEIHTLPNLTIEQMSAFISKLFDDPSQSSELLSEAKKLNDSQAPK

SEQ ID NO: 328 - protein, 58 aa, ARTIFICIAL SEQUENCE
  Engineered IL6 binding polypeptide
VDAKYAKEEREAWFEIHLLPNLTIEQMAAFISKLFDDPSQSSELLSEAKKLNDSQAPK

SEQ ID NO: 329 - protein, 58 aa, ARTIFICIAL SEQUENCE
  Engineered IL6 binding polypeptide
VDAKYAKEERKAWYEIHTLPNLTVNQMAAFISKLFDDPSQSSELLSEAKKLNDSQAPK

SEQ ID NO: 330 - protein, 58 aa, ARTIFICIAL SEQUENCE
  Engineered IL6 binding polypeptide
VDAKYAKEERQAWLEIHLLPNLTIEQMAAFISKLFDDPSQSSELLSEAKKLNDSQAPK

SEQ ID NO: 331 - protein, 58 aa, ARTIFICIAL SEQUENCE
  Engineered IL6 binding polypeptide
VDAKYAKEEHHAWLEIHTLPNLTVDQMAAFISKLFDDPSQSSELLSEAKKLNDSQAPK

SEQ ID NO: 332 - protein, 58 aa, ARTIFICIAL SEQUENCE
  Engineered IL6 binding polypeptide
VDAKYAKEEQQAWWEIHKLPNLTVEQMTAFIIKLYDDPSQSSELLSEAKKLNDSQAPK

SEQ ID NO: 333 - protein, 58 aa, ARTIFICIAL SEQUENCE
  Engineered IL6 binding polypeptide
VDAKYAKEERKAWFEIHALPNLTVTQVAAFISKLFDDPSQSSELLSEAKKLNDSQAPK

SEQ ID NO: 334 - protein, 58 aa, ARTIFICIAL SEQUENCE
  Engineered IL6 binding polypeptide
VDAKYAKEEHRAWTEIHKLPNLTTQQMAAFISKLFDDPSQSSELLSEAKKLNDSQAPK

SEQ ID NO: 335 - protein, 58 aa, ARTIFICIAL SEQUENCE
  Engineered IL6 binding polypeptide
VDAKYAKEEAQAWHEIHILPNLTVDQMAAFISKLFDDPSQSSELLSEAKKLNDSQAPK

SEQ ID NO: 336 - protein, 58 aa, ARTIFICIAL SEQUENCE
  Engineered IL6 binding polypeptide
VDAKYAKEEQKAWFEIHLLPNLTVEQIAAFIQKLFDDPSQSSELLSEAKKLNDSQAPK

SEQ ID NO: 337 - protein, 58 aa, ARTIFICIAL SEQUENCE
  Engineered IL6 binding polypeptide
VDAKYAKEERHAWYEIHLLPNLTVRQMAAFISKLFDDPSQSSELLSEAKKLNDSQAPK

SEQ ID NO: 338 - protein, 58 aa, ARTIFICIAL SEQUENCE
  Engineered IL6 binding polypeptide
VDAKYAKEERDAWYEIHLLPNLTVNQIAAFISKLFDDPSQSSELLSEAKKLNDSQAPK

SEQ ID NO: 339 - protein, 58 aa, ARTIFICIAL SEQUENCE
  Engineered IL6 binding polypeptide
VDAKYAKEEAHAWWEIHALPNLTVDQMAAFISKLFDDPSQSSELLSEAKKLNDSQAPK

SEQ ID NO: 340 - protein, 58 aa, ARTIFICIAL SEQUENCE
  Engineered IL6 binding polypeptide
VDAKYAKEEADAWFEIHVLPNLTIQQIAAFISKLFDDPSQSSELLSEAKKLNDSQAPK

SEQ ID NO: 341 - protein, 58 aa, ARTIFICIAL SEQUENCE
  Engineered IL6 binding polypeptide
VDAKYAKEERRAWFEIHILPNLTINQMAAFISKLFDDPSQSSELLSEAKKLNDSQAPK

SEQ ID NO: 342 - protein, 58 aa, ARTIFICIAL SEQUENCE
  Engineered IL6 binding polypeptide
VDAKYAKEERKAWYEIHVLPNLTVRQMAAFIQKLFDDPSQSSELLSEAKKLNDSQAPK

SEQ ID NO: 343 - protein, 58 aa, ARTIFICIAL SEQUENCE
  Engineered IL6 binding polypeptide
VDAKYAKEERHAWHEIHILPNLTVDQISAFISKLFDDPSQSSELLSEAKKLNDSQAPK

SEQ ID NO: 344 - protein, 58 aa, ARTIFICIAL SEQUENCE
  Engineered IL6 binding polypeptide
VDAKYAKEERKAWLEIHLLPNLTVEQMAAFISKLFDDPSQSSELLSEAKKLNDSQAPK

SEQ ID NO: 345 - protein, 58 aa, ARTIFICIAL SEQUENCE
  Engineered IL6 binding polypeptide
VDAKYAKEEREAWWEIHKLPNLTVTQMAAFISKLFDDPSQSSELLSEAKKLNDSQAPK

SEQ ID NO: 346 - protein, 58 aa, ARTIFICIAL SEQUENCE
  Engineered IL6 binding polypeptide
VDAKYAKEERHAWYEIHTLPNLTVNQMAAFISKLFDDPSQSSELLSEAKKLNDSQAPK

SEQ ID NO: 347 - protein, 58 aa, ARTIFICIAL SEQUENCE
  Engineered IL6 binding polypeptide
VDAKYAKEERHAWYEIHVLPNLTVQQMAAFIQKLFDDPSQSSELLSEAKKLNDSQAPK

SEQ ID NO: 348 - protein, 58 aa, ARTIFICIAL SEQUENCE
  Engineered IL6 binding polypeptide
VDAKYAKEERHAWWEIHALPNLTVEQIAAFIQKLFDDPSQSSELLSEAKKLNDSQAPK

SEQ ID NO: 349 - protein, 58 aa, ARTIFICIAL SEQUENCE
  Engineered IL6 binding polypeptide
VDAKYAKEEAAAWHEIHILPNLTVSQIAAFISKLFDDPSQSSELLSEAKKLNDSQAPK

SEQ ID NO: 350 - protein, 58 aa, ARTIFICIAL SEQUENCE
  Engineered IL6 binding polypeptide
VDAKYAKEEASAWTEIHLLPNLTIDQMAAFIQKLFDDPSQSSELLSEAKKLNDSQAPK

SEQ ID NO: 351 - protein, 58 aa, ARTIFICIAL SEQUENCE
  Engineered IL6 binding polypeptide
VDAKYAKEEQSAWYEIHILPNLTVDQIAAFISKLFDDPSQSSELLSEAKKLNDSQAPK

SEQ ID NO: 352 - protein, 58 aa, ARTIFICIAL SEQUENCE
  Engineered IL6 binding polypeptide
VDAKYAKEEADAWYEIHLLPNLTVNQMAAFISKLFDDPSQSSELLSEAKKLNDSQAPK

SEQ ID NO: 353 - protein, 58 aa, ARTIFICIAL SEQUENCE
  Engineered IL6 binding polypeptide
VDAKYAKEEQRAWFEIHTLPNLTVNQMAAFISKLFDDPSQSSELLSEAKKLNDSQAPK

SEQ ID NO: 354 - protein, 58 aa, ARTIFICIAL SEQUENCE
  Engineered IL6 binding polypeptide
VDAKYAKEEAHAWYEIHILPNLTVSQIAAFISKLFDDPSQSSELLSEAKKLNDSQAPK

SEQ ID NO: 355 - protein, 58 aa, ARTIFICIAL SEQUENCE
  Engineered IL6 binding polypeptide
VDAKYAKEEAAAWREIHSLPNLTTEQMAAFIMKLFDDPSQSSELLSEAKKLNDSQAPK

SEQ ID NO: 356 - protein, 58 aa, ARTIFICIAL SEQUENCE
  Engineered IL6 binding polypeptide
VDAKYAKEEHQAWTEIHLLPNLTVQQITAFISKLFDDPSQSSELLSEAKKLNDSQAPK

SEQ ID NO: 357 - protein, 58 aa, ARTIFICIAL SEQUENCE
  Engineered IL6 binding polypeptide
VDAKYAKEERKAWYEIHSLPNLTVSQMAAFISKLFDDPSQSSELLSEAKKLNDSQAPK

SEQ ID NO: 358 - protein, 58 aa, ARTIFICIAL SEQUENCE
  Engineered IL6 binding polypeptide
VDAKYAKEEAHAWREIHVLPNLTVDQMAAFISKLFDDPSQSSELLSEAKKLNDSQAPK

SEQ ID NO: 359 - protein, 58 aa, ARTIFICIAL SEQUENCE
  Engineered IL6 binding polypeptide
VDAKYAKEEAKAWTEIHLLPNLTVHQIAAFISKLFDDPSQSSELLSEAKKLNDSQAPK

SEQ ID NO: 360 - protein, 58 aa, ARTIFICIAL SEQUENCE
  Engineered IL6 binding polypeptide
VDAKYAKEEREAWFEIHKLPNLTVTQMAAFIIKLFDDPSQSSELLSEAKKLNDSQAPK

SEQ ID NO: 361 - protein, 58 aa, ARTIFICIAL SEQUENCE
  Engineered IL6 binding polypeptide
VDAKYAKEEADAWYEIHILPNLTVSQMAAFISKLFDDPSQSSELLSEAKKLNDSQAPK

SEQ ID NO: 362 - protein, 58 aa, ARTIFICIAL SEQUENCE
  Engineered IL6 binding polypeptide
VDAKYAKEEARAWYEIHILPNLTVNQMAAFITKLFDDPSQSSELLSEAKKLNDSQAPK

SEQ ID NO: 363 - protein, 58 aa, ARTIFICIAL SEQUENCE
  Engineered IL6 binding polypeptide
VDAKYAKEEREAWFEIHLLPNLTITQMAAFISKLFDDPSQSSELLSEAKKLNDSQAPK

SEQ ID NO: 364 - protein, 58 aa, ARTIFICIAL SEQUENCE
  Engineered IL6 binding polypeptide
VDAKYAKEERDAWYEIHLLPNLTVTQMSAFISKLFDDPSQSSELLSEAKKLNDSQAPK

SEQ ID NO: 365 - protein, 58 aa, ARTIFICIAL SEQUENCE
  Engineered IL6 binding polypeptide
VDAKYAKEEHEAWLEIHALPNLTVEQMSAFIIKLYDDPSQSSELLSEAKKLNDSQAPK

SEQ ID NO: 366 - protein, 58 aa, ARTIFICIAL SEQUENCE
  Engineered IL6 binding polypeptide
VDAKYAKEEREAWFEIHLLPNLTVHQMAAFISKLFDDPSQSSELLSEAKKLNDSQAPK

SEQ ID NO: 367 - protein, 58 aa, ARTIFICIAL SEQUENCE
  Engineered IL6 binding polypeptide
VDAKYAKEEHQAWTEIHLLPNLTTEQMAAFIQKLFDDPSQSSELLSEAKKLNDSQAPK

SEQ ID NO: 368 - protein, 58 aa, ARTIFICIAL SEQUENCE
  Engineered IL6 binding polypeptide
VDAKYAKEEARAWYEIHVLPNLTTDQRSAFISKLFDDPSQSSELLSEAKKLNDSQAPK

SEQ ID NO: 369 - protein, 58 aa, ARTIFICIAL SEQUENCE
  Engineered IL6 binding polypeptide
VDAKYAKEERDAWFEIHTLPNLTVSQMAAFISKLFDDPSQSSELLSEAKKLNDSQAPK

SEQ ID NO: 370 - protein, 58 aa, ARTIFICIAL SEQUENCE
  Engineered IL6 binding polypeptide
VDAKYAKEERQAWFEIHSLPNLTVTQMAAFISKLFDDPSQSSELLSEAKKLNDSQAPK

SEQ ID NO: 371 - protein, 58 aa, ARTIFICIAL SEQUENCE
  Engineered IL6 binding polypeptide
VDAKYAKEERQAWWEIHALPNLTAEQVAAFISKLFDDPSQSSELLSEAKKLNDSQAPK

SEQ ID NO: 372 - protein, 58 aa, ARTIFICIAL SEQUENCE
  Engineered IL6 binding polypeptide
VDAKYAKEEAKAWYEIHTLPNLTVDQISAFIIKLFDDPSQSSELLSEAKKLNDSQAPK

SEQ ID NO: 373 - protein, 58 aa, ARTIFICIAL SEQUENCE
  Engineered IL6 binding polypeptide
VDAKYAKEEREAWWEIHLLPNLTVDQISAFISKLFDDPSQSSELLSEAKKLNDSQAPK

SEQ ID NO: 374 - protein, 58 aa, ARTIFICIAL SEQUENCE
  Engineered IL6 binding polypeptide
VDAKYAKEEADAWTEIHSLPNLTVEQMAAFIWKLLDDPSQSSELLSEAKKLNDSQAPK

SEQ ID NO: 375 - protein, 58 aa, ARTIFICIAL SEQUENCE
  Engineered IL6 binding polypeptide
VDAKYAKEERAAWWEIHTLPNLTTDQRSAFIIKLYDDPSQSSELLSEAKKLNDSQAPK

SEQ ID NO: 376 - protein, 58 aa, ARTIFICIAL SEQUENCE
  Engineered IL6 binding polypeptide
VDAKYAKEEHRAWTEIHLLPNLTTDQMAAFIIKLFDDPSQSSELLSEAKKLNDSQAPK

SEQ ID NO: 377 - protein, 58 aa, ARTIFICIAL SEQUENCE
  Engineered IL6 binding polypeptide
VDAKYAKEEADAWWEIHMLPNLTTEQRSAFISKLFDDPSQSSELLSEAKKLNDSQAPK

SEQ ID NO: 378 - protein, 58 aa, ARTIFICIAL SEQUENCE
  Engineered IL6 binding polypeptide
VDAKYAKEEREAWWEIHKLPNLTVEQVAAFISKLFDDPSQSSELLSEAKKLNDSQAPK

SEQ ID NO: 379 - protein, 58 aa, ARTIFICIAL SEQUENCE
  Engineered IL6 binding polypeptide
VDAKYAKEEAHAWWEIHALPNLTVHQMAAFISKLFDDPSQSSELLSEAKKLNDSQAPK

SEQ ID NO: 380 - protein, 58 aa, ARTIFICIAL SEQUENCE
  Engineered IL6 binding polypeptide
VDAKYAKEEAQAWREIHVLPNLTVQQIAAFISKLFDDPSQSSELLSEAKKLNDSQAPK

SEQ ID NO: 381 - protein, 58 aa, ARTIFICIAL SEQUENCE
  Engineered IL6 binding polypeptide
VDAKYAKEERHAWWEIHKLPNLTVEQVAAFISKLFDDPSQSSELLSEAKKLNDSQAPK

SEQ ID NO: 382 - protein, 58 aa, ARTIFICIAL SEQUENCE
  Engineered IL6 binding polypeptide
VDAKYAKEEAQAWWEIHKLPNLTVEQLAAFISKLFDDPSQSSELLSEAKKLNDSQAPK

SEQ ID NO: 383 - protein, 58 aa, ARTIFICIAL SEQUENCE
  Engineered IL6 binding polypeptide
VDAKYAKEERKAWYEIHTLPNLTTDQVAAFISKLFDDPSQSSELLSEAKKLNDSQAPK

SEQ ID NO: 384 - protein, 58 aa, ARTIFICIAL SEQUENCE
  Engineered IL6 binding polypeptide
VDAKYAKEEREAWHEIHLLPNLTIEQVAAFISKLFDDPSQSSELLSEAKKLNDSQAPK

SEQ ID NO: 385 - protein, 58 aa, ARTIFICIAL SEQUENCE
  Engineered IL6 binding polypeptide
VDAKYAKEEQKAWWEIHLLPNLTTEQMAAFISKLFDDPSQSSELLSEAKKLNDSQAPK

SEQ ID NO: 386 - protein, 58 aa, ARTIFICIAL SEQUENCE
  Engineered IL6 binding polypeptide
VDAKYAKEEQAAWLEIHLLPNLTVEQMAAFISKLFDDPSQSSELLSEAKKLNDSQAPK

SEQ ID NO: 387 - protein, 58 aa, ARTIFICIAL SEQUENCE
  Engineered IL6 binding polypeptide
VDAKYAKEEREAWWEIHALPNLTTNQMAAFISKLFDDPSQSSELLSEAKKLNDSQAPK

SEQ ID NO: 388 - protein, 58 aa, ARTIFICIAL SEQUENCE
  Engineered IL6 binding polypeptide
VDAKYAKEEAEAWYEIHILPNLTITQMAAFISKLFDDPSQSSELLSEAKKLNDSQAPK

SEQ ID NO: 389 - protein, 58 aa, ARTIFICIAL SEQUENCE
  Engineered IL6 binding polypeptide
VDAKYAKEERQAWYEIHLLPNLTIEQMAAFISKLFDDPSQSSELLSEAKKLNDSQAPK

SEQ ID NO: 390 - protein, 58 aa, ARTIFICIAL SEQUENCE
  Engineered IL6 binding polypeptide
VDAKYAKEEAKAWFEIHTLPNLTVTQMAAFISKLFDDPSQSSELLSEAKKLNDSQAPK

SEQ ID NO: 391 - protein, 58 aa, ARTIFICIAL SEQUENCE
  Engineered IL6 binding polypeptide
VDAKYAKEEADAWWEIHSLPNLTVDQTAAFISKLFDDPSQSSELLSEAKKLNDSQAPK

SEQ ID NO: 392 - protein, 58 aa, ARTIFICIAL SEQUENCE
  Engineered IL6 binding polypeptide
VDAKYAKEERVAWYEIHILPNLTVEQTAAFISKLFDDPSQSSELLSEAKKLNDSQAPK

SEQ ID NO: 393 - protein, 58 aa, ARTIFICIAL SEQUENCE
  Engineered IL6 binding polypeptide
VDAKYAKEERKAWYEIHTLPNLTVDQMSAFISKLFDDPSQSSELLSEAKKLNDSQAPK

SEQ ID NO: 394 - protein, 58 aa, ARTIFICIAL SEQUENCE
  Engineered IL6 binding polypeptide
VDAKYAKEEAQAWFEIHTLPNLTIEQMAAFIIKLYDDPSQSSELLSEAKKLNDSQAPK

SEQ ID NO: 395 - protein, 58 aa, ARTIFICIAL SEQUENCE
  Engineered IL6 binding polypeptide
VDAKYAKEERQAWYEIHALPNLTVDQMAAFIIKLYDDPSQSSELLSEAKKLNDSQAPK

SEQ ID NO: 396 - protein, 58 aa, ARTIFICIAL SEQUENCE
  Engineered IL6 binding polypeptide
VDAKYAKEEADAWFEIHVLPNLTTEQMTAFISKLFDDPSQSSELLSEAKKLNDSQAPK

SEQ ID NO: 397 - protein, 58 aa, ARTIFICIAL SEQUENCE
  Engineered IL6 binding polypeptide
VDAKYAKEERRAWFEIHALPNLTVEQMAAFISKLFDDPSQSSELLSEAKKLNDSQAPK

SEQ ID NO: 398 - protein, 58 aa, ARTIFICIAL SEQUENCE
  Engineered IL6 binding polypeptide
VDAKYAKEEAKAWYEIHSLPNLTVNQMAAFISKLFDDPSQSSELLSEAKKLNDSQAPK

SEQ ID NO: 399 - protein, 58 aa, ARTIFICIAL SEQUENCE
  Engineered IL6 binding polypeptide
VDAKYAKEEARAWHEIHTLPNLTVHQMAAFIQKLFDDPSQSSELLSEAKKLNDSQAPK

SEQ ID NO: 400 - protein, 58 aa, ARTIFICIAL SEQUENCE
  Engineered IL6 binding polypeptide
VDAKYAKEERRAWREIHTLPNLTVSQMAAFISKLFDDPSQSSELLSEAKKLNDSQAPK

SEQ ID NO: 401 - protein, 58 aa, ARTIFICIAL SEQUENCE
  Engineered IL6 binding polypeptide
VDAKYAKEERAAWYEIHLLPNLTISQMAAFISKLFDDPSQSSELLSEAKKLNDSQAPK

SEQ ID NO: 402 - protein, 58 aa, ARTIFICIAL SEQUENCE
  Engineered IL6 binding polypeptide
VDAKYAKEERKAWWEIHTLPNLTVSQMAAFISKLFDDPSQSSELLSEAKKLNDSQAPK

SEQ ID NO: 403 - protein, 58 aa, ARTIFICIAL SEQUENCE
  Engineered IL6 binding polypeptide
VDAKYAKEERHAWYEIHMLPNLTIEQITAFISKLFDDPSQSSELLSEAKKLNDSQAPK

SEQ ID NO: 404 - protein, 58 aa, ARTIFICIAL SEQUENCE
  Engineered IL6 binding polypeptide
VDAKYAKEEAQAWHEIHLLPNLTVEQMAAFIQKLFDDPSQSSELLSEAKKLNDSQAPK

SEQ ID NO: 405 - protein, 58 aa, ARTIFICIAL SEQUENCE
  Engineered IL6 binding polypeptide
VDAKYAKEERKAWYEIHMLPNLTVDQIAAFISKLFDDPSQSSELLSEAKKLNDSQAPK

SEQ ID NO: 406 - protein, 58 aa, ARTIFICIAL SEQUENCE
  Engineered IL6 binding polypeptide
VDAKYAKEEAHAWWEIHKLPNLTVEQVAAFISKLFDDPSQSSELLSEAKKLNDSQAPK

SEQ ID NO: 407 - protein, 58 aa, ARTIFICIAL SEQUENCE
  Engineered IL6 binding polypeptide
VDAKYAKEERKAWWEIHLLPNLTVNQMAAFISKLFDDPSQSSELLSEAKKLNDSQAPK

SEQ ID NO: 408 - protein, 58 aa, ARTIFICIAL SEQUENCE
  Engineered IL6 binding polypeptide
VDAKYAKEEREAWYEIHLLPNLTVSQMAAFISKLFDDPSQSSELLSEAKKLNDSQAPK

SEQ ID NO: 409 - protein, 58 aa, ARTIFICIAL SEQUENCE
  Engineered IL6 binding polypeptide
VDAKYAKEEAKAWHEIHILPNLTVDQMAAFISKLFDDPSQSSELLSEAKKLNDSQAPK

SEQ ID NO: 410 - protein, 58 aa, ARTIFICIAL SEQUENCE
  Engineered IL6 binding polypeptide
VDAKYAKEERHAWYEIHTLPNLTVEQMAAFIIKLFDDPSQSSELLSEAKKLNDSQAPK

SEQ ID NO: 411 - protein, 58 aa, ARTIFICIAL SEQUENCE
  Engineered IL6 binding polypeptide
VDAKYAKEERHAWTEIHKLPNLTVQQMAAFISKLFDDPSQSSELLSEAKKLNDSQAPK

SEQ ID NO: 412 - protein, 58 aa, ARTIFICIAL SEQUENCE
  Engineered IL6 binding polypeptide
VDAKYAKEERDAWHEIHTLPNLTVNQMAAFISKLFDDPSQSSELLSEAKKLNDSQAPK

SEQ ID NO: 413 - protein, 58 aa, ARTIFICIAL SEQUENCE
  Engineered IL6 binding polypeptide
VDAKYAKEEREAWYEIHLLPNLTTNQRSAFISKLFDDPSQSSELLSEAKKLNDSQAPK

SEQ ID NO: 414 - protein, 58 aa, ARTIFICIAL SEQUENCE
  Engineered IL6 binding polypeptide
VDAKYAKEEAVAWREIHLLPNLTVNQMAAFISKLFDDPSQSSELLSEAKKLNDSQAPK

SEQ ID NO: 415 - protein, 58 aa, ARTIFICIAL SEQUENCE
  Engineered IL6 binding polypeptide
VDAKYAKEERAAWTEIHLLPNLTVDQIAAFISKLFDDPSQSSELLSEAKKLNDSQAPK

SEQ ID NO: 416 - protein, 58 aa, ARTIFICIAL SEQUENCE
  Engineered IL6 binding polypeptide
VDAKYAKEEQAAWFEIHVLPNLTIEQRAAFISKLFDDPSQSSELLSEAKKLNDSQAPK

SEQ ID NO: 417 - protein, 58 aa, ARTIFICIAL SEQUENCE
  Engineered IL6 binding polypeptide
VDAKYAKEERTAWWEIHALPNLTVEQIAAFISKLFDDPSQSSELLSEAKKLNDSQAPK

SEQ ID NO: 418 - protein, 58 aa, ARTIFICIAL SEQUENCE
  Engineered IL6 binding polypeptide
VDAKYAKEEAEAWFEIHTLPNLTVDQRVAFIIKLFDDPSQSSELLSEAKKLNDSQAPK

SEQ ID NO: 419 - protein, 58 aa, ARTIFICIAL SEQUENCE
  Engineered IL6 binding polypeptide
VDAKYAKEEREAWFEIHTLPNLTINQMAAFIIKLFDDPSQSSELLSEAKKLNDSQAPK

SEQ ID NO: 420 - protein, 58 aa, ARTIFICIAL SEQUENCE
  Engineered IL6 binding polypeptide
VDAKYAKEERQAWFEIHALPNLTVQQRAAFISKLFDDPSQSSELLSEAKKLNDSQAPK

SEQ ID NO: 421 - protein, 58 aa, ARTIFICIAL SEQUENCE
  Engineered IL6 binding polypeptide
VDAKYAKEEREAWHEIHLLPNLTIDQLAAFISKLFDDPSQSSELLSEAKKLNDSQAPK

SEQ ID NO: 422 - protein, 58 aa, ARTIFICIAL SEQUENCE
  Engineered IL6 binding polypeptide
VDAKYAKEEHHAWWEIHALPNLTVDQVAAFIIKLYDDPSQSSELLSEAKKLNDSQAPK

SEQ ID NO: 423 - protein, 58 aa, ARTIFICIAL SEQUENCE
  Engineered IL6 binding polypeptide
VDAKYAKEEAKAWYEIHILPNLTVTQITAFISKLFDDPSQSSELLSEAKKLNDSQAPK

SEQ ID NO: 424 - protein, 58 aa, ARTIFICIAL SEQUENCE
  Engineered IL6 binding polypeptide
VDAKYAKEEQQAWFEIHTLPNLTVQQVTAFISKLFDDPSQSSELLSEAKKLNDSQAPK

SEQ ID NO: 425 - protein, 58 aa, ARTIFICIAL SEQUENCE
  Engineered IL6 binding polypeptide
VDAKYAKEERTAWWEIHTLPNLTVTQMAAFISKLFDDPSQSSELLSEAKKLNDSQAPK

SEQ ID NO: 426 - protein, 58 aa, ARTIFICIAL SEQUENCE
  Engineered IL6 binding polypeptide
VDAKYAKEERAAWYEIHLLPNLTVDQMSAFISKLFDDPSQSSELLSEAKKLNDSQAPK

SEQ ID NO: 427 - protein, 58 aa, ARTIFICIAL SEQUENCE
  Engineered IL6 binding polypeptide
VDAKYAKEEQQAWWEIHALPNLTVDQITAFISKLFDDPSQSSELLSEAKKLNDSQAPK

SEQ ID NO: 428 - protein, 58 aa, ARTIFICIAL SEQUENCE
  Engineered IL6 binding polypeptide
VDAKYAKEERRAWYEIHTLPNLTVSQMAAFIIKLFDDPSQSSELLSEAKKLNDSQAPK

SEQ ID NO: 429 - protein, 58 aa, ARTIFICIAL SEQUENCE
  Engineered IL6 binding polypeptide
VDAKYAKEEQRAWTEIHMLPNLTANQMAAFISKLFDDPSQSSELLSEAKKLNDSQAPK

SEQ ID NO: 430 - protein, 58 aa, ARTIFICIAL SEQUENCE
  Engineered IL6 binding polypeptide
VDAKYAKEEHEAWYEIHVLPNLTVNQISAFISKLFDDPSQSSELLSEAKKLNDSQAPK

SEQ ID NO: 431 - protein, 58 aa, ARTIFICIAL SEQUENCE
  Engineered IL6 binding polypeptide
VDAKYAKEEADAWHEIHLLPNLTVEQMAAFIQKLFDDPSQSSELLSEAKKLNDSQAPK

SEQ ID NO: 432 - protein, 58 aa, ARTIFICIAL SEQUENCE
  Engineered IL6 binding polypeptide
VDAKYAKEEREAWFEIHALPNLTVTQMAAFISKLFDDPSQSSELLSEAKKLNDSQAPK

SEQ ID NO: 433 - protein, 58 aa, ARTIFICIAL SEQUENCE
  Engineered IL6 binding polypeptide
VDAKYAKEERDAWYEIHLLPNLTVEQMAAFIQKLFDDPSQSSELLSEAKKLNDSQAPK

SEQ ID NO: 434 - protein, 58 aa, ARTIFICIAL SEQUENCE
  Engineered IL6 binding polypeptide
VDAKYAKEERKAWFEIHLLPNLTVTQMAAFISKLFDDPSQSSELLSEAKKLNDSQAPK

SEQ ID NO: 435 - protein, 58 aa, ARTIFICIAL SEQUENCE
  Engineered IL6 binding polypeptide
VDAKYAKEEAEAWSEIHLLPNLTVEQMAAFISKLFDDPSQSSELLSEAKKLNDSQAPK

SEQ ID NO: 436 - protein, 58 aa, ARTIFICIAL SEQUENCE
  Engineered IL6 binding polypeptide
VDAKYAKEERKAWYEIHSLPNLTVNQMAAFIIKLFDDPSQSSELLSEAKKLNDSQAPK

SEQ ID NO: 437 - protein, 58 aa, ARTIFICIAL SEQUENCE
  Engineered IL6 binding polypeptide
VDAKYAKEEAAAWHEIHVLPNLTVDQMAAFIIKLYDDPSQSSELLSEAKKLNDSQAPK

SEQ ID NO: 438 - protein, 58 aa, ARTIFICIAL SEQUENCE
  Engineered IL6 binding polypeptide
VDAKYAKEERHAWTEIHKLPNLTIQQITAFISKLFDDPSQSSELLSEAKKLNDSQAPK

SEQ ID NO: 439 - protein, 58 aa, ARTIFICIAL SEQUENCE
  Engineered IL6 binding polypeptide
VDAKYAKEERRAWFEIHALPNLTVQQMVAFISKLFDDPSQSSELLSEAKKLNDSQAPK

SEQ ID NO: 440 - protein, 58 aa, ARTIFICIAL SEQUENCE
  Engineered IL6 binding polypeptide
VDAKYAKEERDAWYEIHILPNLTVNQIAAFISKLFDDPSQSSELLSEAKKLNDSQAPK

SEQ ID NO: 441 - protein, 58 aa, ARTIFICIAL SEQUENCE
  Engineered IL6 binding polypeptide
VDAKYAKEEAEAWHEIHVLPNLTVNQMAAFISKLFDDPSQSSELLSEAKKLNDSQAPK

SEQ ID NO: 442 - protein, 58 aa, ARTIFICIAL SEQUENCE
  Engineered IL6 binding polypeptide
VDAKYAKEEARAWHEIHLLPNLTIQQMAAFISKLFDDPSQSSELLSEAKKLNDSQAPK

SEQ ID NO: 443 - protein, 58 aa, ARTIFICIAL SEQUENCE
  Engineered IL6 binding polypeptide
VDAKYAKEEAQAWWEIHALPNLTVDQTAAFIIKLFDDPSQSSELLSEAKKLNDSQAPK

SEQ ID NO: 444 - protein, 58 aa, ARTIFICIAL SEQUENCE
  Engineered IL6 binding polypeptide
VDAKYAKEEADAWFEIHTLPNLTVEQIAAFISKLFDDPSQSSELLSEAKKLNDSQAPK

SEQ ID NO: 445 - protein, 58 aa, ARTIFICIAL SEQUENCE
  Engineered IL6 binding polypeptide
VDAKYAKEEAAAWYEIHILPNLTVQQMAAFISKLFDDPSQSSELLSEAKKLNDSQAPK

SEQ ID NO: 446 - protein, 58 aa, ARTIFICIAL SEQUENCE
  Engineered IL6 binding polypeptide
VDAKYAKEEAEAWFEIHVLPNLTVSQIAAFISKLFDDPSQSSELLSEAKKLNDSQAPK

SEQ ID NO: 447 - protein, 58 aa, ARTIFICIAL SEQUENCE
  Engineered IL6 binding polypeptide
VDAKYAKEEQSAWYEIHLLPNLTTNQLTAFISKLFDDPSQSSELLSEAKKLNDSQAPK

SEQ ID NO: 448 - protein, 58 aa, ARTIFICIAL SEQUENCE
  Engineered IL6 binding polypeptide
VDAKYAKEEARAWYEIHTLPNLTATQMAAFISKLFDDPSQSSELLSEAKKLNDSQAPK

SEQ ID NO: 449 - protein, 58 aa, ARTIFICIAL SEQUENCE
  Engineered IL6 binding polypeptide
VDAKYAKEEADAWWEIHALPNLTVDQVTAFIIKLYDDPSQSSELLSEAKKLNDSQAPK

SEQ ID NO: 450 - protein, 58 aa, ARTIFICIAL SEQUENCE
  Engineered IL6 binding polypeptide
VDAKYAKEEAHAWREIHILPNLTVNQMAAFISKLFDDPSQSSELLSEAKKLNDSQAPK

SEQ ID NO: 451 - protein, 58 aa, ARTIFICIAL SEQUENCE
  Engineered IL6 binding polypeptide
VDAKYAKEEAQAWHEIHLLPNLTVHQMAAFISKLFDDPSQSSELLSEAKKLNDSQAPK

SEQ ID NO: 452 - protein, 58 aa, ARTIFICIAL SEQUENCE
  Engineered IL6 binding polypeptide
VDAKYAKEEARAWHEIHILPNLTTDQMAAFISKLFDDPSQSSELLSEAKKLNDSQAPK

SEQ ID NO: 453 - protein, 58 aa, ARTIFICIAL SEQUENCE
  Engineered IL6 binding polypeptide
VDAKYAKEERHAWHEIHILPNLTVDQMAAFISKLFDDPSQSSELLSEAKKLNDSQAPK

SEQ ID NO: 454 - protein, 58 aa, ARTIFICIAL SEQUENCE
  Engineered IL6 binding polypeptide
VDAKYAKEERHAWREIHLLPNLTVNQMAAFISKLFDDPSQSSELLSEAKKLNDSQAPK

SEQ ID NO: 455 - protein, 58 aa, ARTIFICIAL SEQUENCE
  Engineered IL6 binding polypeptide
VDAKYAKEERTAWWEIHALPNLTVSQVAAFISKLFDDPSQSSELLSEAKKLNDSQAPK

SEQ ID NO: 456 - protein, 58 aa, ARTIFICIAL SEQUENCE
  Engineered IL6 binding polypeptide
VDAKYAKEERHAWYEIHILPNLTVDQMAAFITKLFDDPSQSSELLSEAKKLNDSQAPK

SEQ ID NO: 457 - protein, 58 aa, ARTIFICIAL SEQUENCE
  Engineered IL6 binding polypeptide
VDAKYAKEEQRAWREIHLLPNLTVDQMAAFISKLFDDPSQSSELLSEAKKLNDSQAPK

SEQ ID NO: 458 - protein, 58 aa, ARTIFICIAL SEQUENCE
  Engineered IL6 binding polypeptide
VDAKYAKEERQAWYEIHVLPNLTVHQMAAFISKLFDDPSQSSELLSEAKKLNDSQAPK

SEQ ID NO: 459 - protein, 58 aa, ARTIFICIAL SEQUENCE
  Engineered IL6 binding polypeptide
VDAKYAKEEAQAWHEIHTLPNLTVSQMAAFISKLFDDPSQSSELLSEAKKLNDSQAPK

SEQ ID NO: 460 - protein, 58 aa, ARTIFICIAL SEQUENCE
  Engineered IL6 binding polypeptide
VDAKYAKEEREAWLEIHLLPNLTIDQMSAFISKLFDDPSQSSELLSEAKKLNDSQAPK

SEQ ID NO: 461 - protein, 58 aa, ARTIFICIAL SEQUENCE
  Engineered IL6 binding polypeptide
VDAKYAKEEHRAWFEIHLLPNLTTEQMAAFISKLFDDPSQSSELLSEAKKLNDSQAPK

SEQ ID NO: 462 - protein, 58 aa, ARTIFICIAL SEQUENCE
  Engineered IL6 binding polypeptide
VDAKYAKEERRAWYEIHLLPNLTTDQMAAFISKLFDDPSQSSELLSEAKKLNDSQAPK

SEQ ID NO: 463 - protein, 58 aa, ARTIFICIAL SEQUENCE
  Engineered IL6 binding polypeptide
VDAKYAKEEREAWYEIHILPNLTVSQIAAFISKLFDDPSQSSELLSEAKKLNDSQAPK

SEQ ID NO: 464 - protein, 58 aa, ARTIFICIAL SEQUENCE
  Engineered IL6 binding polypeptide
VDAKYAKEERDAWYEIHILPNLTVDQMAAFISKLFDDPSQSSELLSEAKKLNDSQAPK

SEQ ID NO: 465 - protein, 58 aa, ARTIFICIAL SEQUENCE
  Engineered IL6 binding polypeptide
VDAKYAKEERDAWYEIHLLPNLTVSQMAAFISKLFDDPSQSSELLSEAKKLNDSQAPK

SEQ ID NO: 466 - protein, 58 aa, ARTIFICIAL SEQUENCE
  Engineered IL6 binding polypeptide
VDAKYAKEERTAWFEIHSLPNLTAEQMAAFIIKLYDDPSQSSELLSEAKKLNDSQAPK

SEQ ID NO: 467 - protein, 58 aa, ARTIFICIAL SEQUENCE
  Engineered IL6 binding polypeptide
VDAKYAKEEHRAWLEIHTLPNLTVDQMAAFISKLFDDPSQSSELLSEAKKLNDSQAPK

SEQ ID NO: 468 - protein, 58 aa, ARTIFICIAL SEQUENCE
  Engineered IL6 binding polypeptide
VDAKYAKEEHAAWYEIHLLPNLTVSQISAFIQKLFDDPSQSSELLSEAKKLNDSQAPK

SEQ ID NO: 469 - protein, 58 aa, ARTIFICIAL SEQUENCE
  Engineered IL6 binding polypeptide
VDAKYAKEEADAWYEIHALPNLTVDQMAAFISKLFDDPSQSSELLSEAKKLNDSQAPK

SEQ ID NO: 470 - protein, 58 aa, ARTIFICIAL SEQUENCE
  Engineered IL6 binding polypeptide
VDAKYAKEEAEAWWEIHTLPNLTVDQMAAFISKLFDDPSQSSELLSEAKKLNDSQAPK

SEQ ID NO: 471 - protein, 58 aa, ARTIFICIAL SEQUENCE
  Engineered IL6 binding polypeptide
VDAKYAKEEAEAWWEIHKLPNLTVEQMTAFIIKLYDDPSQSSELLSEAKKLNDSQAPK

SEQ ID NO: 472 - protein, 58 aa, ARTIFICIAL SEQUENCE
  Engineered IL6 binding polypeptide
VDAKYAKEEHHAWREIHILPNLTVEQMAAFIIKLFDDPSQSSELLSEAKKLNDSQAPK

SEQ ID NO: 473 - protein, 58 aa, ARTIFICIAL SEQUENCE
  Engineered IL6 binding polypeptide
VDAKYAKEEREAWYEIHLLPNLTIQQMAAFISKLFDDPSQSSELLSEAKKLNDSQAPK

SEQ ID NO: 474 - protein, 58 aa, ARTIFICIAL SEQUENCE
  Engineered IL6 binding polypeptide
VDAKYAKEEHAAWLEIHLLPNLTIDQMAAFISKLFDDPSQSSELLSEAKKLNDSQAPK

SEQ ID NO: 475 - protein, 58 aa, ARTIFICIAL SEQUENCE
  Engineered IL6 binding polypeptide
VDAKYAKEERAAWYEIHLLPNLTIHQMAAFISKLFDDPSQSSELLSEAKKLNDSQAPK

SEQ ID NO: 476 - protein, 58 aa, ARTIFICIAL SEQUENCE
  Engineered IL6 binding polypeptide
VDAKYAKEERTAWYEIHLLPNLTVHQMAAFISKLFDDPSQSSELLSEAKKLNDSQAPK

SEQ ID NO: 477 - protein, 58 aa, ARTIFICIAL SEQUENCE
  Engineered IL6 binding polypeptide
VDAKYAKEERHAWHEIHSLPNLTIDQLTAFISKLFDDPSQSSELLSEAKKLNDSQAPK

SEQ ID NO: 478 - protein, 58 aa, ARTIFICIAL SEQUENCE
  Engineered IL6 binding polypeptide
VDAKYAKEEREAWYEIHSLPNLTVDQVAAFISKLFDDPSQSSELLSEAKKLNDSQAPK

SEQ ID NO: 479 - protein, 58 aa, ARTIFICIAL SEQUENCE
  Engineered IL6 binding polypeptide
VDAKYAKEEHHAWHEIHTLPNLTVHQMAAFISKLFDDPSQSSELLSEAKKLNDSQAPK

SEQ ID NO: 480 - protein, 58 aa, ARTIFICIAL SEQUENCE
  Engineered IL6 binding polypeptide
VDAKYAKEEAHAWHEIHLLPNLTVEQMAAFISKLFDDPSQSSELLSEAKKLNDSQAPK

SEQ ID NO: 481 - protein, 58 aa, ARTIFICIAL SEQUENCE
  Engineered IL6 binding polypeptide
VDAKYAKEEAHAWWEIHKLPNLTVNQVAAFISKLFDDPSQSSELLSEAKKLNDSQAPK

SEQ ID NO: 482 - protein, 58 aa, ARTIFICIAL SEQUENCE
  Engineered IL6 binding polypeptide
VDAKYAKEEARAWYEIHILPNLTVTQMAAFISKLFDDPSQSSELLSEAKKLNDSQAPK

SEQ ID NO: 483 - protein, 58 aa, ARTIFICIAL SEQUENCE
  Engineered IL6 binding polypeptide
VDAKYAKEEARAWWEIHLLPNLTVDQISAFISKLFDDPSQSSELLSEAKKLNDSQAPK

SEQ ID NO: 484 - protein, 58 aa, ARTIFICIAL SEQUENCE
  Engineered IL6 binding polypeptide
VDAKYAKEEHDAWFEIHLLPNLTVEQIAAFISKLFDDPSQSSELLSEAKKLNDSQAPK

SEQ ID NO: 485 - protein, 58 aa, ARTIFICIAL SEQUENCE
  Engineered IL6 binding polypeptide
VDAKYAKEEHTAWYEIHLLPNLTVDQMAAFISKLFDDPSQSSELLSEAKKLNDSQAPK

SEQ ID NO: 486 - protein, 58 aa, ARTIFICIAL SEQUENCE
  Engineered IL6 binding polypeptide
VDAKYAKEEREAWWEIHALPNLTVNQMAAFIIKLFDDPSQSSELLSEAKKLNDSQAPK

SEQ ID NO: 487 - protein, 58 aa, ARTIFICIAL SEQUENCE
  Engineered IL6 binding polypeptide
VDAKYAKEERDAWYEISTLPNLTVEQAAAFISKLFDDPSQSSELLSEAKKLNDSQAPK

SEQ ID NO: 488 - protein, 58 aa, ARTIFICIAL SEQUENCE
  Engineered IL6 binding polypeptide
VDAKYAKEEREAWYEIHLLPNLTITQMAAFISKLFDDPSQSSELLSEAKKLNDSQAPK

SEQ ID NO: 489 - protein, 58 aa, ARTIFICIAL SEQUENCE
  Engineered IL6 binding polypeptide
VDAKYAKEEAKAWFEIHTLPNLTVDQVAAFISKLFDDPSQSSELLSEAKKLNDSQAPK

SEQ ID NO: 490 - protein, 58 aa, ARTIFICIAL SEQUENCE
  Engineered IL6 binding polypeptide
VDAKYAKEERQAWWEIHTLPNLTVEQMSAFISKLYDDPSQSSELLSEAKKLNDSQAPK

SEQ ID NO: 491 - protein, 58 aa, ARTIFICIAL SEQUENCE
  Engineered IL6 binding polypeptide
VDAKYAKEEHEAWHEIHILPNLTIDQMAAFISKLFDDPSQSSELLSEAKKLNDSQAPK

SEQ ID NO: 492 - protein, 58 aa, ARTIFICIAL SEQUENCE
  Engineered IL6 binding polypeptide
VDAKYAKEERDAWFEIHLLPNLTVEQMAAFISKLFDDPSQSSELLSEAKKLNDSQAPK

SEQ ID NO: 493 - protein, 58 aa, ARTIFICIAL SEQUENCE
  Engineered IL6 binding polypeptide
VDAKYAKEEAKAWWEIHSLPNLTVNQMAAFISKLFDDPSQSSELLSEAKKLNDSQAPK

SEQ ID NO: 494 - protein, 58 aa, ARTIFICIAL SEQUENCE
  Engineered IL6 binding polypeptide
VDAKYAKEEARAWWEIHLLPNLTIDQMAAFISKLFDDPSQSSELLSEAKKLNDSQAPK

SEQ ID NO: 495 - protein, 58 aa, ARTIFICIAL SEQUENCE
  Engineered IL6 binding polypeptide
VDAKYAKEEQKAWWEIHSLPNLTVDQITAFISKLFDDPSQSSELLSEAKKLNDSQAPK

SEQ ID NO: 496 - protein, 58 aa, ARTIFICIAL SEQUENCE
  Engineered IL6 binding polypeptide
VDAKYAKEEREAWYEIHLLPNLTVSQIAAFISKLFDDPSQSSELLSEAKKLNDSQAPK

SEQ ID NO: 497 - protein, 58 aa, ARTIFICIAL SEQUENCE
  Engineered IL6 binding polypeptide
VDAKYAKEERRAWHEIQTLPNLTVRQMAAFISKLFDDPSQSSELLSEAKKLNDSQAPK

SEQ ID NO: 498 - protein, 58 aa, ARTIFICIAL SEQUENCE
  Engineered IL6 binding polypeptide
VDAKYAKEERQAWYEIHTLPNLTATQMAAFIQKLFDDPSQSSELLSEAKKLNDSQAPK

SEQ ID NO: 499 - protein, 58 aa, ARTIFICIAL SEQUENCE
  Engineered IL6 binding polypeptide
VDAKYAKEERHAWTEIHLLPNLTVNQMAAFIIKLFDDPSQSSELLSEAKKLNDSQAPK

SEQ ID NO: 500 - protein, 58 aa, ARTIFICIAL SEQUENCE
  Engineered IL6 binding polypeptide
VDAKYAKEEARAWHEIHVLPNLTVNQMTAFISKLFDDPSQSSELLSEAKKLNDSQAPK

SEQ ID NO: 501 - protein, 58 aa, ARTIFICIAL SEQUENCE
  Engineered IL6 binding polypeptide
VDAKYAKEEAEAWYEIHILPNLTVNQIAAFISKLFDDPSQSSELLSEAKKLNDSQAPK

SEQ ID NO: 502 - protein, 58 aa, ARTIFICIAL SEQUENCE
  Engineered IL6 binding polypeptide
VDAKYAKEEAEAWREIHLLPNLTVDQMAAFISKLFDDPSQSSELLSEAKKLNDSQAPK

SEQ ID NO: 503 - protein, 58 aa, ARTIFICIAL SEQUENCE
  Engineered IL6 binding polypeptide
VDAKYAKEERSAWFEIHTLPNLTVDQMAAFISKLFDDPSQSSELLSEAKKLNDSQAPK

SEQ ID NO: 504 - protein, 58 aa, ARTIFICIAL SEQUENCE
  Engineered IL6 binding polypeptide
VDAKYAKEEAQAWYEIHALPNLTVEQMAAFISKLFDDPSQSSELLSEAKKLNDSQAPK

SEQ ID NO: 505 - protein, 58 aa, ARTIFICIAL SEQUENCE
  Engineered IL6 binding polypeptide
VDAKYAKEERTAWWEIHALPNLTVNQVTAFISKLFDDPSQSSELLSEAKKLNDSQAPK

SEQ ID NO: 506 - protein, 58 aa, ARTIFICIAL SEQUENCE
  Engineered IL6 binding polypeptide
VDAKYAKEEAEAWFEIHVLPNLTTDQRVAFITKLFDDPSQSSELLSEAKKLNDSQAPK

SEQ ID NO: 507 - protein, 58 aa, ARTIFICIAL SEQUENCE
  Engineered IL6 binding polypeptide
VDAKYAKEEAEAWYEIHVLPNLTVDQMAAFIQKLFDDPSQSSELLSEAKKLNDSQAPK

SEQ ID NO: 508 - protein, 58 aa, ARTIFICIAL SEQUENCE
  Engineered IL6 binding polypeptide
VDAKYAKEEREAWLEIHLLPNLTVEQMAAFISKLFDDPSQSSELLSEAKKLNDSQAPK

SEQ ID NO: 509 - protein, 58 aa, ARTIFICIAL SEQUENCE
  Engineered IL6 binding polypeptide
VDAKYAKEERAAWWEIHSLPNLTVSQMAAFISKLFDDPSQSSELLSEAKKLNDSQAPK

SEQ ID NO: 510 - protein, 58 aa, ARTIFICIAL SEQUENCE
  Engineered IL6 binding polypeptide
VDAKYAKEEAKAWREIHLLPNLTVNQMAAFISKLFDDPSQSSELLSEAKKLNDSQAPK

SEQ ID NO: 511 - protein, 58 aa, ARTIFICIAL SEQUENCE
  Engineered IL6 binding polypeptide
VDAKYAKEERQAWWEIHALPNLTVTQMAAFISKLFDDPSQSSELLSEAKKLNDSQAPK

SEQ ID NO: 512 - protein, 58 aa, ARTIFICIAL SEQUENCE
  Engineered IL6 binding polypeptide
VDAKYAKEERDAWFEIHTLPNLTVDQMAAFIQKLFDDPSQSSELLSEAKKLNDSQAPK

SEQ ID NO: 513 - protein, 58 aa, ARTIFICIAL SEQUENCE
  Engineered IL6 binding polypeptide
VDAKYAKEERRAWYEIHSLPNLTVNQMAAFISKLFDDPSQSSELLSEAKKLNDSQAPK

SEQ ID NO: 514 - protein, 58 aa, ARTIFICIAL SEQUENCE
  Engineered IL6 binding polypeptide
VDAKYAKEEHQAWHEIHLLPNLTVSQMAAFIQKLFDDPSQSSELLSEAKKLNDSQAPK

SEQ ID NO: 515 - protein, 58 aa, ARTIFICIAL SEQUENCE
  Engineered IL6 binding polypeptide
VDAKYAKEERHAWFEIHKLPNLTTDQIAAFISKLFDDPSQSSELLSEAKKLNDSQAPK

SEQ ID NO: 516 - protein, 58 aa, ARTIFICIAL SEQUENCE
  Engineered IL6 binding polypeptide
VDAKYAKEEAHAWHEIHLLPNLTIDQMAAFIMKLFDDPSQSSELLSEAKKLNDSQAPK

SEQ ID NO: 517 - protein, 58 aa, ARTIFICIAL SEQUENCE
  Engineered IL6 binding polypeptide
VDAKYAKEERAAWYEIHLLPNLTIEQMSAFISKLFDDPSQSSELLSEAKKLNDSQAPK

SEQ ID NO: 518 - protein, 58 aa, ARTIFICIAL SEQUENCE
  Engineered IL6 binding polypeptide
VDAKYAKEEAKAWFEIHALPNLTTTQMAAFISKLFDDPSQSSELLSEAKKLNDSQAPK

SEQ ID NO: 519 - protein, 58 aa, ARTIFICIAL SEQUENCE
  Engineered IL6 binding polypeptide
VDAKYAKEERKAWYEIHILPNLTVDQMAAFISKLFDDPSQSSELLSEAKKLNDSQAPK

SEQ ID NO: 520 - protein, 58 aa, ARTIFICIAL SEQUENCE
  Engineered IL6 binding polypeptide
VDAKYAKEERQAWHEIHILPNLTITQRTAFISKLFDDPSQSSELLSEAKKLNDSQAPK

SEQ ID NO: 521 - protein, 58 aa, ARTIFICIAL SEQUENCE
  Engineered IL6 binding polypeptide
VDAKYAKEERRAWYEIHTLPNLTITQMAAFIQKLFDDPSQSSELLSEAKKLNDSQAPK

SEQ ID NO: 522 - protein, 58 aa, ARTIFICIAL SEQUENCE
  Engineered IL6 binding polypeptide
VDAKYAKEEAEAWLEIHLLPNLTVSQMAAFIWKLFDDPSQSSELLSEAKKLNDSQAPK

SEQ ID NO: 523 - protein, 58 aa, ARTIFICIAL SEQUENCE
  Engineered IL6 binding polypeptide
VDAKYAKEEAHAWWEIHALPNLTTNQMAAFISKLFDDPSQSSELLSEAKKLNDSQAPK

SEQ ID NO: 524 - protein, 58 aa, ARTIFICIAL SEQUENCE
  Engineered IL6 binding polypeptide
VDAKYAKEERHAWTEIHKLPNLTINQMVAFIIKLFDDPSQSSELLSEAKKLNDSQAPK

SEQ ID NO: 525 - protein, 58 aa, ARTIFICIAL SEQUENCE
  Engineered IL6 binding polypeptide
VDAKYAKEERQAWTEIHLLPNLTVDQMAAFISKLFDDPSQSSELLSEAKKLNDSQAPK

SEQ ID NO: 526 - protein, 58 aa, ARTIFICIAL SEQUENCE
  Engineered IL6 binding polypeptide
VDAKYAKEEAHAWHEIHILPNLTVRQMAAFISKLFDDPSQSSELLSEAKKLNDSQAPK

SEQ ID NO: 527 - protein, 58 aa, ARTIFICIAL SEQUENCE
  Engineered IL6 binding polypeptide
VDAKYAKEERQAWHEIHTLPNLTVNQMAAFISKLFDDPSQSSELLSEAKKLNDSQAPK

SEQ ID NO: 528 - protein, 58 aa, ARTIFICIAL SEQUENCE
  Engineered IL6 binding polypeptide
VDAKYAKEERHAWWEIHKLPNLTVNQMAAFISKLFDDPSQSSELLSEAKKLNDSQAPK

SEQ ID NO: 529 - protein, 58 aa, ARTIFICIAL SEQUENCE
  Engineered IL6 binding polypeptide
VDAKYAKEEAKAWFEIHKLPNLTANQMAAFIIKLYDDPSQSSELLSEAKKLNDSQAPK

SEQ ID NO: 530 - protein, 58 aa, ARTIFICIAL SEQUENCE
  Engineered IL6 binding polypeptide
VDAKYAKEEREAWYEIHILPNLTVQQRVAFISKLFDDPSQSSELLSEAKKLNDSQAPK

SEQ ID NO: 531 - protein, 58 aa, ARTIFICIAL SEQUENCE
  Engineered IL6 binding polypeptide
VDAKYAKEEQEAWHEIHILPNLTVTQMTAFISKLFDDPSQSSELLSEAKKLNDSQAPK

SEQ ID NO: 532 - protein, 58 aa, ARTIFICIAL SEQUENCE
  Engineered IL6 binding polypeptide
VDAKYAKEERQAWFEIHVLPNLTIEQMAAFISKLFDDPSQSSELLSEAKKLNDSQAPK

SEQ ID NO: 533 - protein, 58 aa, ARTIFICIAL SEQUENCE
  Engineered IL6 binding polypeptide
VDAKYAKEERQAWYEIHKLPNLTVSQMTAFISKLFDDPSQSSELLSEAKKLNDSQAPK

SEQ ID NO: 534 - protein, 58 aa, ARTIFICIAL SEQUENCE
  Engineered IL6 binding polypeptide
VDAKYAKEEREAWWEIHLLPNLTIDQMAAFIQKLFDDPSQSSELLSEAKKLNDSQAPK

SEQ ID NO: 535 - protein, 58 aa, ARTIFICIAL SEQUENCE
  Engineered IL6 binding polypeptide
VDAKYAKEERDAWYEIHTLPNLTVHQMAAFISKLFDDPSQSSELLSEAKKLNDSQAPK

SEQ ID NO: 536 - protein, 58 aa, ARTIFICIAL SEQUENCE
  Engineered IL6 binding polypeptide
VDAKYAKEEQAAWFEIHALPNLTVSQMAAFISKLFDDPSQSSELLSEAKKLNDSQAPK

SEQ ID NO: 537 - protein, 58 aa, ARTIFICIAL SEQUENCE
  Engineered IL6 binding polypeptide
VDAKYAKEEAHAWYEIHILPNLTVRQIAAFIQKLFDDPSQSSELLSEAKKLNDSQAPK

SEQ ID NO: 538 - protein, 58 aa, ARTIFICIAL SEQUENCE
  Engineered IL6 binding polypeptide
VDAKYAKEEAKAWWEIHSLPNLTAEQVSAFIQKLFDDPSQSSELLSEAKKLNDSQAPK

SEQ ID NO: 539 - protein, 58 aa, ARTIFICIAL SEQUENCE
  Engineered IL6 binding polypeptide
VDAKYAKEEQKAWHEIHILPNLTTHQRVAFISKLFDDPSQSSELLSEAKKLNDSQAPK

SEQ ID NO: 540 - protein, 58 aa, ARTIFICIAL SEQUENCE
  Engineered IL6 binding polypeptide
VDAKYAKEERQAWYEIHALPNLTVTQMAAFISKLFDDPSQSSELLSEAKKLNDSQAPK

SEQ ID NO: 541 - protein, 58 aa, ARTIFICIAL SEQUENCE
  Engineered IL6 binding polypeptide
VDAKYAKEERDAWYEIHILPNLTVSQMSAFIQKLFDDPSQSSELLSEAKKLNDSQAPK

SEQ ID NO: 542 - protein, 58 aa, ARTIFICIAL SEQUENCE
  Engineered IL6 binding polypeptide
VDAKYAKEEHDAWYEIHLLPNLTVQQMAAFISKLFDDPSQSSELLSEAKKLNDSQAPK

SEQ ID NO: 543 - protein, 58 aa, ARTIFICIAL SEQUENCE
  Engineered IL6 binding polypeptide
VDAKYAKEEAHAWREIHLLPNLTVHQRTAFISKLFDDPSQSSELLSEAKKLNDSQAPK

SEQ ID NO: 544 - protein, 58 aa, ARTIFICIAL SEQUENCE
  Engineered IL6 binding polypeptide
VDAKYAKEERHAWREIHLLPNLTHTQMAAFISKLFDDPSQSSELLSEAKKLNDSQAPK

SEQ ID NO: 545 - protein, 58 aa, ARTIFICIAL SEQUENCE
  Engineered IL6 binding polypeptide
VDAKYAKEERHAWYEIHVLPNLTIQQMAAFIQKLFDDPSQSSELLSEAKKLNDSQAPK

SEQ ID NO: 546 - protein, 58 aa, ARTIFICIAL SEQUENCE
  Engineered IL6 binding polypeptide
VDAKYAKEERKAWYEIHILPNLTTNQMAAFISKLFDDPSQSSELLSEAKKLNDSQAPK

SEQ ID NO: 547 - protein, 58 aa, ARTIFICIAL SEQUENCE
  Engineered IL6 binding polypeptide
VDAKYAKEERDAWREIHLLPNLTVRQLSAFISKLFDDPSQSSELLSEAKKLNDSQAPK

SEQ ID NO: 548 - protein, 58 aa, ARTIFICIAL SEQUENCE
  Engineered IL6 binding polypeptide
VDAKYAKEERQAWYEIHLLPNLTTQQMAAFIQKLFDDPSQSSELLSEAKKLNDSQAPK

SEQ ID NO: 549 - protein, 58 aa, ARTIFICIAL SEQUENCE
  Engineered IL6 binding polypeptide
VDAKYAKEERKAWREIHTLPNLTVQQMAAFISKLFDDPSQSSELLSEAKKLNDSQAPK

SEQ ID NO: 550 - protein, 58 aa, ARTIFICIAL SEQUENCE
  Engineered IL6 binding polypeptide
VDAKYAKEERHAWLEIHKLPNLTATQMAAFISKLFDDPSQSSELLSEAKKLNDSQAPK

SEQ ID NO: 551 - protein, 58 aa, ARTIFICIAL SEQUENCE
  Engineered IL6 binding polypeptide
VDAKYAKEEREAWYEIHVLPNLTVEQMVAFIIKLYDDPSQSSELLSEAKKLNDSQAPK

SEQ ID NO: 552 - protein, 58 aa, ARTIFICIAL SEQUENCE
  Engineered IL6 binding polypeptide
VDAKYAKEERQAWFEIHTLPNLTVDQMVAFISKLFDDPSQSSELLSEAKKLNDSQAPK

SEQ ID NO: 553 - protein, 58 aa, ARTIFICIAL SEQUENCE
  Engineered IL6 binding polypeptide
VDAKYAKEEARAWYEIHSLPNLTVDQMSAFIIKLYDDPSQSSELLSEAKKLNDSQAPK

SEQ ID NO: 554 - protein, 58 aa, ARTIFICIAL SEQUENCE
  Engineered IL6 binding polypeptide
VDAKYAKEEAHAWWEIHLLPNLTVHQIAAFISKLFDDPSQSSELLSEAKKLNDSQAPK

SEQ ID NO: 555 - protein, 58 aa, ARTIFICIAL SEQUENCE
  Engineered IL6 binding polypeptide
VDAKYAKEEAQAWHEIHILPNLTIQQIAAFISKLFDDPSQSSELLSEAKKLNDSQAPK

SEQ ID NO: 556 - protein, 58 aa, ARTIFICIAL SEQUENCE
  Engineered IL6 binding polypeptide
VDAKYAKEEQDAWWEIHKLPNLTVNQMAAFISKLYDDPSQSSELLSEAKKLNDSQAPK

SEQ ID NO: 557 - protein, 58 aa, ARTIFICIAL SEQUENCE
  Engineered IL6 binding polypeptide
VDAKYAKEERAAWHEIHLLPNLTISQMAAFISKLFDDPSQSSELLSEAKKLNDSQAPK

SEQ ID NO: 558 - protein, 58 aa, ARTIFICIAL SEQUENCE
  Engineered IL6 binding polypeptide
VDAKYAKEERQAWFEIHVLPNLTIHQIAAFISKLFDDPSQSSELLSEAKKLNDSQAPK

SEQ ID NO: 559 - protein, 58 aa, ARTIFICIAL SEQUENCE
  Engineered IL6 binding polypeptide
VDAKYAKEEREAWWEIHALPNLTANQMAAFISKLFDDPSQSSELLSEAKKLNDSQAPK

SEQ ID NO: 560 - protein, 58 aa, ARTIFICIAL SEQUENCE
  Engineered IL6 binding polypeptide
VDAKYAKEEATAWHEIHLLPNLTITQMAAFISKLFDDPSQSSELLSEAKKLNDSQAPK

SEQ ID NO: 561 - protein, 58 aa, ARTIFICIAL SEQUENCE
  Engineered IL6 binding polypeptide
VDAKYAKEERKAWYEIHLLPNLTISQMTAFISKLFDDPSQSSELLSEAKKLNDSQAPK

SEQ ID NO: 562 - protein, 58 aa, ARTIFICIAL SEQUENCE
  Engineered IL6 binding polypeptide
VDAKYAKEEAKAWFEIHALPNLTIQQMAAFISKLFDDPSQSSELLSEAKKLNDSQAPK

SEQ ID NO: 563 - protein, 58 aa, ARTIFICIAL SEQUENCE
  Engineered IL6 binding polypeptide
VDAKYAKEEARAWHEIHILPNLTTQQMAAFISKLFDDPSQSSELLSEAKKLNDSQAPK

SEQ ID NO: 564 - protein, 58 aa, ARTIFICIAL SEQUENCE
  Engineered IL6 binding polypeptide
VDAKYAKEEAQAWYEIHLLPNLTVSQIAAFIVKLYDDPSQSSELLSEAKKLNDSQAPK

SEQ ID NO: 565 - protein, 58 aa, ARTIFICIAL SEQUENCE
  Engineered IL6 binding polypeptide
VDAKYAKEERHAWFEIHKLPNLTVDQVSAFIIKLYDDPSQSSELLSEAKKLNDSQAPK

SEQ ID NO: 566 - protein, 58 aa, ARTIFICIAL SEQUENCE
  Engineered IL6 binding polypeptide
VDAKYAKEERQAWYEIHVLPNLTVSQMTAFISKLFDDPSQSSELLSEAKKLNDSQAPK

SEQ ID NO: 567 - protein, 58 aa, ARTIFICIAL SEQUENCE
  Engineered IL6 binding polypeptide
VDAKYAKEEADAWHEIHLLPNLTIDQMAAFISKLFDDPSQSSELLSEAKKLNDSQAPK

SEQ ID NO: 568 - protein, 58 aa, ARTIFICIAL SEQUENCE
  Engineered IL6 binding polypeptide
VDAKYAKEEASAWREIHILPNLTVNQMAAFISKLFDDPSQSSELLSEAKKLNDSQAPK

SEQ ID NO: 569 - protein, 58 aa, ARTIFICIAL SEQUENCE
  Engineered IL6 binding polypeptide
VDAKYAKEEAQAWYEIHILPNLTVDQMAAFISKLFDDPSQSSELLSEAKKLNDSQAPK

SEQ ID NO: 570 - protein, 58 aa, ARTIFICIAL SEQUENCE
  Engineered IL6 binding polypeptide
VDAKYAKEERSAWYEIHILPNLTVHQMTAFISKLFDDPSQSSELLSEAKKLNDSQAPK

SEQ ID NO: 571 - protein, 58 aa, ARTIFICIAL SEQUENCE
  Engineered IL6 binding polypeptide
VDAKYAKEEATAWREIHLLPNLTVEQMAAFISKLFDDPSQSSELLSEAKKLNDSQAPK

SEQ ID NO: 572 - protein, 58 aa, ARTIFICIAL SEQUENCE
  Engineered IL6 binding polypeptide
VDAKYAKEERTAWYEIHILPNLTVEQMTAFIQKLFDDPSQSSELLSEAKKLNDSQAPK

SEQ ID NO: 573 - protein, 58 aa, ARTIFICIAL SEQUENCE
  Engineered IL6 binding polypeptide
VDAKYAKEEAHAWHEIHILPNLTVDQVVAFISKLFDDPSQSSELLSEAKKLNDSQAPK

SEQ ID NO: 574 - protein, 58 aa, ARTIFICIAL SEQUENCE
  Engineered IL6 binding polypeptide
VDAKYAKEERRAWYEIHLLPNLTVEQMAAFISKLFDDPSQSSELLSEAKKLNDSQAPK

SEQ ID NO: 575 - protein, 58 aa, ARTIFICIAL SEQUENCE
  Engineered IL6 binding polypeptide
VDAKYAKEERKAWYEIHLLPNLTVSQMTAFISKLFDDPSQSSELLSEAKKLNDSQAPK

SEQ ID NO: 576 - protein, 58 aa, ARTIFICIAL SEQUENCE
  Engineered IL6 binding polypeptide
VDAKYAKEERRAWFEIHSLPNLTVRQIAAFIIKLFDDPSQSSELLSEAKKLNDSQAPK

SEQ ID NO: 577 - protein, 58 aa, ARTIFICIAL SEQUENCE
  Engineered IL6 binding polypeptide
VDAKYAKEERQAWTEIHVLPNLTVNQMAAFISKLFDDPSQSSELLSEAKKLNDSQAPK

SEQ ID NO: 578 - protein, 58 aa, ARTIFICIAL SEQUENCE
  Engineered IL6 binding polypeptide
VDAKYAKEEAHAWYEIHILPNLTIQQMAAFISKLFDDPSQSSELLSEAKKLNDSQAPK

SEQ ID NO: 579 - protein, 58 aa, ARTIFICIAL SEQUENCE
  Engineered IL6 binding polypeptide
VDAKYAKEERSAWYEIHLLPNLTVDQMTAFIQKLFDDPSQSSELLSEAKKLNDSQAPK

SEQ ID NO: 580 - protein, 58 aa, ARTIFICIAL SEQUENCE
  Engineered IL6 binding polypeptide
VDAKYAKEERRAWWEIHTLPNLTVDQMVAFISKLFDDPSQSSELLSEAKKLNDSQAPK

SEQ ID NO: 581 - protein, 58 aa, ARTIFICIAL SEQUENCE
  Engineered IL6 binding polypeptide
VDAKYAKEERAAWFEIHMLPNLTVEQMAAFISKLFDDPSQSSELLSEAKKLNDSQAPK

SEQ ID NO: 582 - protein, 58 aa, ARTIFICIAL SEQUENCE
  Engineered IL6 binding polypeptide
VDAKYAKEERTAWYEIHALPNLTVDQMVAFISKLFDDPSQSSELLSEAKKLNDSQAPK

SEQ ID NO: 583 - protein, 58 aa, ARTIFICIAL SEQUENCE
  Engineered IL6 binding polypeptide
VDAKYAKEERQAWWEIHALPNLTVSQMAAFISKLFDDPSQSSELLSEAKKLNDSQAPK

SEQ ID NO: 584 - protein, 58 aa, ARTIFICIAL SEQUENCE
  Engineered IL6 binding polypeptide
VDAKYAKEERAAWYEIHLLPNLTVEQMAAFISKLFDDPSQSSELLSEAKKLNDSQAPK

SEQ ID NO: 585 - protein, 58 aa, ARTIFICIAL SEQUENCE
  Engineered IL6 binding polypeptide
VDAKYAKEEQQAWWEIHALPNLTIDQMTAFISKLFDDPSQSSELLSEAKKLNDSQAPK

SEQ ID NO: 586 - protein, 58 aa, ARTIFICIAL SEQUENCE
  Engineered IL6 binding polypeptide
VDAKYAKEERRAWFEIHSLPNLTVRQMAAFISKLFDDPSQSSELLSEAKKLNDSQAPK

SEQ ID NO: 587 - protein, 58 aa, ARTIFICIAL SEQUENCE
  Engineered IL6 binding polypeptide
VDAKYAKEERHAWWEIHKLPNLTVDQMAAFISKLFDDPSQSSELLSEAKKLNDSQAPK

SEQ ID NO: 588 - protein, 58 aa, ARTIFICIAL SEQUENCE
  Engineered IL6 binding polypeptide
VDAKYAKEERKAWWEIHLLPNLTVTQIAAFISKLFDDPSQSSELLSEAKKLNDSQAPK

SEQ ID NO: 589 - protein, 58 aa, ARTIFICIAL SEQUENCE
  Engineered IL6 binding polypeptide
VDAKYAKEERRAWFEIHSLPNLTVHQMAAFISKLFDDPSQSSELLSEAKKLNDSQAPK

SEQ ID NO: 590 - protein, 58 aa, ARTIFICIAL SEQUENCE
  Engineered IL6 binding polypeptide
VDAKYAKEEAAAWWEIHMLPNLTVSQMAAFISKLFDDPSQSSELLSEAKKLNDSQAPK

SEQ ID NO: 591 - protein, 58 aa, ARTIFICIAL SEQUENCE
  Engineered IL6 binding polypeptide
VDAKYAKEEAKAWHEIHLLPNLTVHQMAAFIIKLFDDPSQSSELLSEAKKLNDSQAPK

SEQ ID NO: 592 - protein, 58 aa, ARTIFICIAL SEQUENCE
  Engineered IL6 binding polypeptide
VDAKYAKEERKAWTEIHLLPNLTVEQMAAFISKLFDDPSQSSELLSEAKKLNDSQAPK

SEQ ID NO: 593 - protein, 58 aa, ARTIFICIAL SEQUENCE
  Engineered IL6 binding polypeptide
VDAKYAKEEREAWFEIHVLPNLTIRQMAAFISKLFDDPSQSSELLSEAKKLNDSQAPK

SEQ ID NO: 594 - protein, 58 aa, ARTIFICIAL SEQUENCE
  Engineered IL6 binding polypeptide
VDAKYAKEEREAWYEIHALPNLTVQQMSAFISKLFDDPSQSSELLSEAKKLNDSQAPK

SEQ ID NO: 595 - protein, 58 aa, ARTIFICIAL SEQUENCE
  Engineered IL6 binding polypeptide
VDAKYAKEERQAWFEIHTLPNLTANQMAAFIIKLYDDPSQSSELLSEAKKLNDSQAPK

SEQ ID NO: 596 - protein, 58 aa, ARTIFICIAL SEQUENCE
  Engineered IL6 binding polypeptide
VDAKYAKEERHAWYEIHTLPNLTVQQMAAFISKLFDDPSQSSELLSEAKKLNDSQAPK

SEQ ID NO: 597 - protein, 58 aa, ARTIFICIAL SEQUENCE
  Engineered IL6 binding polypeptide
VDAKYAKEERRAWYEIHLLPNLTVNQMVAFISKLFDDPSQSSELLSEAKKLNDSQAPK

SEQ ID NO: 598 - protein, 58 aa, ARTIFICIAL SEQUENCE
  Engineered IL6 binding polypeptide
VDAKYAKEERHAWYEIHLLPNLTVEQMAAFISKLFDDPSQSSELLSEAKKLNDSQAPK

SEQ ID NO: 599 - protein, 58 aa, ARTIFICIAL SEQUENCE
  Engineered IL6 binding polypeptide
VDAKYAKEERKAWYEIHLLPNLTVHQMAAFISKLFDDPSQSSELLSEAKKLNDSQAPK

SEQ ID NO: 600 - protein, 58 aa, ARTIFICIAL SEQUENCE
  Engineered IL6 binding polypeptide
VDAKYAKEERSAWWEIHTLPNLTVDQMVAFISKLFDDPSQSSELLSEAKKLNDSQAPK

SEQ ID NO: 601 - protein, 58 aa, ARTIFICIAL SEQUENCE
  Engineered IL6 binding polypeptide
VDAKYAKEEARAWFEIHTLPNLTVDQMAAFISKLFDDPSQSSELLSEAKKLNDSQAPK

SEQ ID NO: 602 - protein, 58 aa, ARTIFICIAL SEQUENCE
  Engineered IL6 binding polypeptide
VDAKYAKEERRAWYEIHSLPNLTVTQMVAFISKLFDDPSQSSELLSEAKKLNDSQAPK

SEQ ID NO: 603 - protein, 58 aa, ARTIFICIAL SEQUENCE
  Engineered IL6 binding polypeptide
VDAKYAKEEARAWHEIHVLPNLTVEQMTAFIIKLFDDPSQSSELLSEAKKLNDSQAPK

SEQ ID NO: 604 - protein, 58 aa, ARTIFICIAL SEQUENCE
  Engineered IL6 binding polypeptide
VDAKYAKEERDAWYEIHLLPNLTIDQMAAFIQKLFDDPSQSSELLSEAKKLNDSQAPK

SEQ ID NO: 605 - protein, 58 aa, ARTIFICIAL SEQUENCE
  Engineered IL6 binding polypeptide
VDAKYAKEEREAWWEIHLLPNLTIRQMAAFISKLFDDPSQSSELLSEAKKLNDSQAPK

SEQ ID NO: 606 - protein, 58 aa, ARTIFICIAL SEQUENCE
  Engineered IL6 binding polypeptide
VDAKYAKEEQQAWYEIHLLPNLTVEQMAAFISKLFDDPSQSSELLSEAKKLNDSQAPK

SEQ ID NO: 607 - protein, 58 aa, ARTIFICIAL SEQUENCE
  Engineered IL6 binding polypeptide
VDAKYAKEERDAWWEIHALPNLTVNQMAAFISKLFDDPSQSSELLSEAKKLNDSQAPK

SEQ ID NO: 608 - protein, 58 aa, ARTIFICIAL SEQUENCE
  Engineered IL6 binding polypeptide
VDAKYAKEEARAWYEIHILPNLTVTQMAAFIQKLFDDPSQSSELLSEAKKLNDSQAPK

SEQ ID NO: 609 - protein, 58 aa, ARTIFICIAL SEQUENCE
  Engineered IL6 binding polypeptide
VDAKYAKEERVAWYEIHMLPNLTVSQMAAFISKLFDDPSQSSELLSEAKKLNDSQAPK

SEQ ID NO: 610 - protein, 58 aa, ARTIFICIAL SEQUENCE
  Engineered IL6 binding polypeptide
VDAKYAKEERTAWWEIHALPNLTVQQRSAFISKLFDDPSQSSELLSEAKKLNDSQAPK

SEQ ID NO: 611 - protein, 58 aa, ARTIFICIAL SEQUENCE
  Engineered IL6 binding polypeptide
VDAKYAKEEAKAWYEIHLLPNLTVRQMAAFISKLFDDPSQSSELLSEAKKLNDSQAPK

SEQ ID NO: 612 - protein, 58 aa, ARTIFICIAL SEQUENCE
  Engineered IL6 binding polypeptide
VDAKYAKEERKAWYEIHLLPNLTVRQMAAFIWKLLDDPSQSSELLSEAKKLNDSQAPK

SEQ ID NO: 613 - protein, 58 aa, ARTIFICIAL SEQUENCE
  Engineered IL6 binding polypeptide
VDAKYAKEERQAWYEIHTLPNLTIDQMSAFISKLFDDPSQSSELLSEAKKLNDSQAPK

SEQ ID NO: 614 - protein, 58 aa, ARTIFICIAL SEQUENCE
  Engineered IL6 binding polypeptide
VDAKYAKEERKAWWEIHKLPNLTVTQMAAFISKLFDDPSQSSELLSEAKKLNDSQAPK

SEQ ID NO: 615 - protein, 58 aa, ARTIFICIAL SEQUENCE
  Engineered IL6 binding polypeptide
VDAKYAKEERKAWYEIHALPNLTVEQMAAFIQKLFDDPSQSSELLSEAKKLNDSQAPK

SEQ ID NO: 616 - protein, 58 aa, ARTIFICIAL SEQUENCE
  Engineered IL6 binding polypeptide
VDAKYAKEEAHAWREIHLLPNLTVQQIAAFISKLFDDPSQSSELLSEAKKLNDSQAPK

SEQ ID NO: 617 - protein, 58 aa, ARTIFICIAL SEQUENCE
  Engineered IL6 binding polypeptide
VDAKYAKEERHAWHEIHILPNLTVQQMAAFISKLFDDPSQSSELLSEAKKLNDSQAPK

SEQ ID NO: 618 - protein, 58 aa, ARTIFICIAL SEQUENCE
  Engineered IL6 binding polypeptide
VDAKYAKEERDAWFEIHALPNLTANQMAAFISKLFDDPSQSSELLSEAKKLNDSQAPK

SEQ ID NO: 619 - protein, 58 aa, ARTIFICIAL SEQUENCE
  Engineered IL6 binding polypeptide
VDAKYAKEEAKAWYEIHLLPNLTVNQMAAFISKLFDDPSQSSELLSEAKKLNDSQAPK

SEQ ID NO: 620 - protein, 58 aa, ARTIFICIAL SEQUENCE
  Engineered IL6 binding polypeptide
VDAKYAKEERDAWFEIHSLPNLTVSQMAAFIIKLFDDPSQSSELLSEAKKLNDSQAPK

SEQ ID NO: 621 - protein, 58 aa, ARTIFICIAL SEQUENCE
  Engineered IL6 binding polypeptide
VDAKYAKEERKAWWEIHVLPNLTVDQMAAFISKLFDDPSQSSELLSEAKKLNDSQAPK

SEQ ID NO: 622 - protein, 58 aa, ARTIFICIAL SEQUENCE
  Engineered IL6 binding polypeptide
VDAKYAKEEAHAWYEIHTLPNLTVRQMAAFISKLFDDPSQSSELLSEAKKLNDSQAPK

SEQ ID NO: 623 - protein, 58 aa, ARTIFICIAL SEQUENCE
  Engineered IL6 binding polypeptide
VDAKYAKEEARAWREIHTLPNLTVNQMAAFISKLFDDPSQSSELLSEAKKLNDSQAPK

SEQ ID NO: 624 - protein, 58 aa, ARTIFICIAL SEQUENCE
  Engineered IL6 binding polypeptide
VDAKYAKEERRAWTEIHLLPNLTVEQMAAFISKLFDDPSQSSELLSEAKKLNDSQAPK

SEQ ID NO: 625 - protein, 58 aa, ARTIFICIAL SEQUENCE
  Engineered IL6 binding polypeptide
VDAKYAKEEAHAWHEIHTLPNLTIDQMVAFISKLFDDPSQSSELLSEAKKLNDSQAPK

SEQ ID NO: 626 - protein, 58 aa, ARTIFICIAL SEQUENCE
  Engineered IL6 binding polypeptide
VDAKYAKEERQAWYEIHLLPNLTVHQMAAFISKLFDDPSQSSELLSEAKKLNDSQAPK

SEQ ID NO: 627 - protein, 58 aa, ARTIFICIAL SEQUENCE
  Engineered IL6 binding polypeptide
VDAKYAKEERRAWWEIHLLPNLTVRQMAAFISKLFDDPSQSSELLSEAKKLNDSQAPK

SEQ ID NO: 628 - protein, 58 aa, ARTIFICIAL SEQUENCE
  Engineered IL6 binding polypeptide
VDAKYAKEEAHAWTEIHKLPNLTVDQMTAFIIKLYDDPSQSSELLSEAKKLNDSQAPK

SEQ ID NO: 629 - protein, 58 aa, ARTIFICIAL SEQUENCE
  Engineered IL6 binding polypeptide
VDAKYAKEEARAWREIHLLPNLTVTQMAAFISKLFDDPSQSSELLSEAKKLNDSQAPK

SEQ ID NO: 630 - protein, 58 aa, ARTIFICIAL SEQUENCE
  Engineered IL6 binding polypeptide
VDAKYAKEERQAWWEIHSLPNLTIEQMVAFISKLFDDPSQSSELLSEAKKLNDSQAPK

SEQ ID NO: 631 - protein, 58 aa, ARTIFICIAL SEQUENCE
  Engineered IL6 binding polypeptide
VDAKYAKEERDAWYEIHLLPNLTIQQMAAFIQKLFDDPSQSSELLSEAKKLNDSQAPK

SEQ ID NO: 632 - protein, 58 aa, ARTIFICIAL SEQUENCE
  Engineered IL6 binding polypeptide
VDAKYAKEERTAWWEIHKLPNLTVTQMAAFISKLFDDPSQSSELLSEAKKLNDSQAPK

SEQ ID NO: 633 - protein, 58 aa, ARTIFICIAL SEQUENCE
  Engineered IL6 binding polypeptide
VDAKYAKEERDAWYEIHILPNLTIEQMAAFISKLFDDPSQSSELLSEAKKLNDSQAPK

SEQ ID NO: 634 - protein, 58 aa, ARTIFICIAL SEQUENCE
  Engineered IL6 binding polypeptide
VDAKYAKEEREAWWEIHSLPNLTAHQMAAFIIKLFDDPSQSSELLSEAKKLNDSQAPK

SEQ ID NO: 635 - protein, 58 aa, ARTIFICIAL SEQUENCE
  Engineered IL6 binding polypeptide
VDAKYAKEERKAWYEIHSLPNLTVSQMSAFISKLFDDPSQSSELLSEAKKLNDSQAPK

SEQ ID NO: 636 - protein, 58 aa, ARTIFICIAL SEQUENCE
  Engineered IL6 binding polypeptide
VDAKYAKEERHAWFEIHALPNLTVSQMVAFISKLFDDPSQSSELLSEAKKLNDSQAPK

SEQ ID NO: 637 - protein, 58 aa, ARTIFICIAL SEQUENCE
  Engineered IL6 binding polypeptide
VDAKYAKEERHAWREIHLLPNLTTEQMSAFIQKLFDDPSQSSELLSEAKKLNDSQAPK

SEQ ID NO: 638 - protein, 58 aa, ARTIFICIAL SEQUENCE
  Engineered IL6 binding polypeptide
VDAKYAKEEHRAWTEIHTLPNLTVDQMAAFIIKLFDDPSQSSELLSEAKKLNDSQAPK

SEQ ID NO: 639 - protein, 58 aa, ARTIFICIAL SEQUENCE
  Engineered IL6 binding polypeptide
VDAKYAKEERDAWYEIHLLPNLTTQQRAAFIVKLFDDPSQSSELLSEAKKLNDSQAPK

SEQ ID NO: 640 - protein, 58 aa, ARTIFICIAL SEQUENCE
  Engineered IL6 binding polypeptide
VDAKYAKEEAQAWWEIHALPNLTVSQMVAFIMKLFDDPSQSSELLSEAKKLNDSQAPK

SEQ ID NO: 641 - protein, 58 aa, ARTIFICIAL SEQUENCE
  Engineered IL6 binding polypeptide
VDAKYAKEEREAWWEIHALPNLTVNQVVAFISKLFDDPSQSSELLSEAKKLNDSQAPK

SEQ ID NO: 642 - protein, 58 aa, ARTIFICIAL SEQUENCE
  Engineered IL6 binding polypeptide
VDAKYAKEERQAWYEIHVLPNLTVNQMAAFISKLFDDPSQSSELLSEAKKLNDSQAPK

SEQ ID NO: 643 - protein, 58 aa, ARTIFICIAL SEQUENCE
  Engineered IL6 binding polypeptide
VDAKYAKEERSAWYEIHLLPNLTVHQMTAFISKLFDDPSQSSELLSEAKKLNDSQAPK

SEQ ID NO: 644 - protein, 58 aa, ARTIFICIAL SEQUENCE
  Engineered IL6 binding polypeptide
VDAKYAKEEAKAWYEIHILPNLTVHQIAAFIQKLFDDPSQSSELLSEAKKLNDSQAPK

SEQ ID NO: 645 - protein, 58 aa, ARTIFICIAL SEQUENCE
  Engineered IL6 binding polypeptide
VDAKYAKEEQQAWLEIHTLPNLTVSQMAAFISKLFDDPSQSSELLSEAKKLNDSQAPK

SEQ ID NO: 646 - protein, 58 aa, ARTIFICIAL SEQUENCE
  Engineered IL6 binding polypeptide
VDAKYAKEEAHAWREIHLLPNLTVTQMAAFISKLFDDPSQSSELLSEAKKLNDSQAPK

SEQ ID NO: 647 - protein, 58 aa, ARTIFICIAL SEQUENCE
  Engineered IL6 binding polypeptide
VDAKYAKEERAAWFEIHLLPNLTIHQMAAFISKLFDDPSQSSELLSEAKKLNDSQAPK

SEQ ID NO: 648 - protein, 58 aa, ARTIFICIAL SEQUENCE
  Engineered IL6 binding polypeptide
VDAKYAKEEQQAWYEIHILPNLTVSQMAAFISKLFDDPSQSSELLSEAKKLNDSQAPK

SEQ ID NO: 649 - protein, 58 aa, ARTIFICIAL SEQUENCE
  Engineered IL6 binding polypeptide
VDAKYAKEERDAWYEIHTLPNLTINQMAAFISKLFDDPSQSSELLSEAKKLNDSQAPK

SEQ ID NO: 650 - protein, 58 aa, ARTIFICIAL SEQUENCE
  Engineered IL6 binding polypeptide
VDAKYAKEEAHAWYEIHILPNLTVNQITAFISKLFDDPSQSSELLSEAKKLNDSQAPK

SEQ ID NO: 651 - protein, 58 aa, ARTIFICIAL SEQUENCE
  Engineered IL6 binding polypeptide
VDAKYAKEERRAWWEIHALPNLTVSQMVAFISKLFDDPSQSSELLSEAKKLNDSQAPK

SEQ ID NO: 652 - protein, 58 aa, ARTIFICIAL SEQUENCE
  Engineered IL6 binding polypeptide
VDAKYAKEEAQAWYEIHTLPNLTVHQMAAFISKLFDDPSQSSELLSEAKKLNDSQAPK

SEQ ID NO: 653 - protein, 58 aa, ARTIFICIAL SEQUENCE
  Engineered IL6 binding polypeptide
VDAKYAKEERAAWFEIHKLPNLTVEQMTAFIHKLYDDPSQSSELLSEAKKLNDSQAPK

SEQ ID NO: 654 - protein, 58 aa, ARTIFICIAL SEQUENCE
  Engineered IL6 binding polypeptide
VDAKYAKEEAHAWREIHLLPNLTITQMAAFIQKLFDDPSQSSELLSEAKKLNDSQAPK

SEQ ID NO: 655 - protein, 58 aa, ARTIFICIAL SEQUENCE
  Engineered IL6 binding polypeptide
VDAKYAKEEARAWHEIHVLPNLTVTQVVAFISKLFDDPSQSSELLSEAKKLNDSQAPK

SEQ ID NO: 656 - protein, 58 aa, ARTIFICIAL SEQUENCE
  Engineered IL6 binding polypeptide
VDAKYAKEEAKAWHEIHVLPNLTVSQIAAFISKLFDDPSQSSELLSEAKKLNDSQAPK

SEQ ID NO: 657 - protein, 58 aa, ARTIFICIAL SEQUENCE
  Engineered IL6 binding polypeptide
VDAKYAKEEHRAWYEIHLLPNLTINQMAAFISKLFDDPSQSSELLSEAKKLNDSQAPK

SEQ ID NO: 658 - protein, 58 aa, ARTIFICIAL SEQUENCE
  Engineered IL6 binding polypeptide
VDAKYAKEEAHAWTEIHKLPNLTTQQMAAFIQKLFDDPSQSSELLSEAKKLNDSQAPK

SEQ ID NO: 659 - protein, 58 aa, ARTIFICIAL SEQUENCE
  Engineered IL6 binding polypeptide
VDAKYAKEERTAWYEIHLLPNLTVRQMVAFISKLFDDPSQSSELLSEAKKLNDSQAPK

SEQ ID NO: 660 - protein, 58 aa, ARTIFICIAL SEQUENCE
  Engineered IL6 binding polypeptide
VDAKYAKEERKAWYEIHLLPNLTIQQIAAFISKLFDDPSQSSELLSEAKKLNDSQAPK

SEQ ID NO: 661 - protein, 58 aa, ARTIFICIAL SEQUENCE
  Engineered IL6 binding polypeptide
VDAKYAKEEREAWHEIHLLPNLTVTQMAAFIIKLFDDPSQSSELLSEAKKLNDSQAPK

SEQ ID NO: 662 - protein, 58 aa, ARTIFICIAL SEQUENCE
  Engineered IL6 binding polypeptide
VDAKYAKEEARAWWEIHLLPNLTVEQMAAFISKLFDDPSQSSELLSEAKKLNDSQAPK

SEQ ID NO: 663 - protein, 58 aa, ARTIFICIAL SEQUENCE
  Engineered IL6 binding polypeptide
VDAKYAKEERQAWWEIHILPNLTVTQMAAFISKLFDDPSQSSELLSEAKKLNDSQAPK

SEQ ID NO: 664 - protein, 58 aa, ARTIFICIAL SEQUENCE
  Engineered IL6 binding polypeptide
VDAKYAKEEAQAWREIHTLPNLTANQMAAFIIKLYDDPSQSSELLSEAKKLNDSQAPK

SEQ ID NO: 665 - protein, 58 aa, ARTIFICIAL SEQUENCE
  Engineered IL6 binding polypeptide
VDAKYAKEERHAWTEIHLLPNLTISQMAAFISKLFDDPSQSSELLSEAKKLNDSQAPK

SEQ ID NO: 666 - protein, 58 aa, ARTIFICIAL SEQUENCE
  Engineered IL6 binding polypeptide
VDAKYAKEEARAWWEIHMLPNLTVTQMAAFISKLFDDPSQSSELLSEAKKLNDSQAPK

SEQ ID NO: 667 - protein, 58 aa, ARTIFICIAL SEQUENCE
  Engineered IL6 binding polypeptide
VDAKYAKEEREAWWEIHLLPNLTAEQMAAFISKLFDDPSQSSELLSEAKKLNDSQAPK

SEQ ID NO: 668 - protein, 58 aa, ARTIFICIAL SEQUENCE
  Engineered IL6 binding polypeptide
VDAKYAKEEATAWWEIHLLPNLTVTQMAAFIQKLFDDPSQSSELLSEAKKLNDSQAPK

SEQ ID NO: 669 - protein, 58 aa, ARTIFICIAL SEQUENCE
  Engineered IL6 binding polypeptide
VDAKYAKEEAKAWHEIHLLPNLTVNQMAAFISKLFDDPSQSSELLSEAKKLNDSQAPK

SEQ ID NO: 670 - protein, 58 aa, ARTIFICIAL SEQUENCE
  Engineered IL6 binding polypeptide
VDAKYAKEERRAWYEIHLLPNLTITQMTAFISKLFDDPSQSSELLSEAKKLNDSQAPK

SEQ ID NO: 671 - protein, 58 aa, ARTIFICIAL SEQUENCE
  Engineered IL6 binding polypeptide
VDAKYAKEERRAWYEIHLLPNLTVHQIAAFISKLFDDPSQSSELLSEAKKLNDSQAPK

SEQ ID NO: 672 - protein, 58 aa, ARTIFICIAL SEQUENCE
  Engineered IL6 binding polypeptide
VDAKYAKEEHEAWWEIHLLPNLTVTQMAAFISKLFDDPSQSSELLSEAKKLNDSQAPK

SEQ ID NO: 673 - protein, 58 aa, ARTIFICIAL SEQUENCE
  Engineered IL6 binding polypeptide
VDAKYAKEERKAWTEIHSLPNLTVDQMSAFIIKLFDDPSQSSELLSEAKKLNDSQAPK

SEQ ID NO: 674 - protein, 58 aa, ARTIFICIAL SEQUENCE
  Engineered IL6 binding polypeptide
VDAKYAKEEAKAWFEIHLLPNLTINQMAAFISKLFDDPSQSSELLSEAKKLNDSQAPK

SEQ ID NO: 675 - protein, 58 aa, ARTIFICIAL SEQUENCE
  Engineered IL6 binding polypeptide
VDAKYAKEERDAWYEIHVLPNLTIEQMSAFISKLFDDPSQSSELLSEAKKLNDSQAPK

SEQ ID NO: 676 - protein, 58 aa, ARTIFICIAL SEQUENCE
  Engineered IL6 binding polypeptide
VDAKYAKEEAHAWWEIHALPNLTVTQMAAFISKLFDDPSQSSELLSEAKKLNDSQAPK

SEQ ID NO: 677 - protein, 58 aa, ARTIFICIAL SEQUENCE
  Engineered IL6 binding polypeptide
VDAKYAKEEAKAWYEIHLLPNLTVTQMAAFISKLFDDPSQSSELLSEAKKLNDSQAPK

SEQ ID NO: 678 - protein, 58 aa, ARTIFICIAL SEQUENCE
  Engineered IL6 binding polypeptide
VDAKYAKEERDAWWEIHKLPNLTVSQMAAFISKLFDDPSQSSELLSEAKKLNDSQAPK

SEQ ID NO: 679 - protein, 58 aa, ARTIFICIAL SEQUENCE
  Engineered IL6 binding polypeptide
VDAKYAKEERDAWYEIHLLPNLTVRQMAAFISKLFDDPSQSSELLSEAKKLNDSQAPK

SEQ ID NO: 680 - protein, 58 aa, ARTIFICIAL SEQUENCE
  Engineered IL6 binding polypeptide
VDAKYAKEERAAWWEIHLLPNLTVQQMAAFISKLFDDPSQSSELLSEAKKLNDSQAPK

SEQ ID NO: 681 - protein, 58 aa, ARTIFICIAL SEQUENCE
  Engineered IL6 binding polypeptide
VDAKYAKEEQQAWYEIHLLPNLTVTQMAAFIIKLFDDPSQSSELLSEAKKLNDSQAPK

SEQ ID NO: 682 - protein, 58 aa, ARTIFICIAL SEQUENCE
  Engineered IL6 binding polypeptide
VDAKYAKEEADAWFEIHILPNLTIDQMAAFIQKLFDDPSQSSELLSEAKKLNDSQAPK

SEQ ID NO: 683 - protein, 58 aa, ARTIFICIAL SEQUENCE
  Engineered IL6 binding polypeptide
VDAKYAKEEREAWHEIHTLPNLTVDQMAAFISKLFDDPSQSSELLSEAKKLNDSQAPK

SEQ ID NO: 684 - protein, 58 aa, ARTIFICIAL SEQUENCE
  Engineered IL6 binding polypeptide
VDAKYAKEEATAWFEIHTLPNLTVSQMAAFIWKLFDDPSQSSELLSEAKKLNDSQAPK

SEQ ID NO: 685 - protein, 58 aa, ARTIFICIAL SEQUENCE
  Engineered IL6 binding polypeptide
VDAKYAKEEAAAWHEIHILPNLTHHQMAAFIQKLFDDPSQSSELLSEAKKLNDSQAPK

SEQ ID NO: 686 - protein, 58 aa, ARTIFICIAL SEQUENCE
  Engineered IL6 binding polypeptide
VDAKYAKEERDAWFEIHALPNLTVNQMAAFIIKLYDDPSQSSELLSEAKKLNDSQAPK

SEQ ID NO: 687 - protein, 58 aa, ARTIFICIAL SEQUENCE
  Engineered IL6 binding polypeptide
VDAKYAKEERKAWYEIHLLPNLTTSQHAAFISKLFDDPSQSSELLSEAKKLNDSQAPK

SEQ ID NO: 688 - protein, 58 aa, ARTIFICIAL SEQUENCE
  Engineered IL6 binding polypeptide
VDAKYAKEERDAWYEIHLLPNLTVRQMSAFIIKLFDDPSQSSELLSEAKKLNDSQAPK

SEQ ID NO: 689 - protein, 58 aa, ARTIFICIAL SEQUENCE
  Engineered IL6 binding polypeptide
VDAKYAKEEAVAWHEIHALPNLTVDQMSAFISKLFDDPSQSSELLSEAKKLNDSQAPK

SEQ ID NO: 690 - protein, 58 aa, ARTIFICIAL SEQUENCE
  Engineered IL6 binding polypeptide
VDAKYAKEEAKAWFEIHALPNLTIEQMVAFISKLFDDPSQSSELLSEAKKLNDSQAPK

SEQ ID NO: 691 - protein, 58 aa, ARTIFICIAL SEQUENCE
  Engineered IL6 binding polypeptide
VDAKYAKEEADAWHEIHILPNLTVQQMAAFIQKLFDDPSQSSELLSEAKKLNDSQAPK

SEQ ID NO: 692 - protein, 58 aa, ARTIFICIAL SEQUENCE
  Engineered IL6 binding polypeptide
VDAKYAKEEAAAWWEIHSLPNLTVSQMAAFIWKLFDDPSQSSELLSEAKKLNDSQAPK

SEQ ID NO: 693 - protein, 58 aa, ARTIFICIAL SEQUENCE
  Engineered IL6 binding polypeptide
VDAKYAKEEAKAWHEIHTLPNLTVDQMAAFISKLFDDPSQSSELLSEAKKLNDSQAPK

SEQ ID NO: 694 - protein, 58 aa, ARTIFICIAL SEQUENCE
  Engineered IL6 binding polypeptide
VDAKYAKEEAQAWWEIHILPNLTVNQIAAFISKLFDDPSQSSELLSEAKKLNDSQAPK

SEQ ID NO: 695 - protein, 58 aa, ARTIFICIAL SEQUENCE
  Engineered IL6 binding polypeptide
VDAKYAKEERSAWFEIHVLPNLTIRQMSAFISKLFDDPSQSSELLSEAKKLNDSQAPK

SEQ ID NO: 696 - protein, 58 aa, ARTIFICIAL SEQUENCE
  Engineered IL6 binding polypeptide
VDAKYAKEERRAWLEIHLLPNLTVTQMTAFISKLFDDPSQSSELLSEAKKLNDSQAPK

SEQ ID NO: 697 - protein, 58 aa, ARTIFICIAL SEQUENCE
  Engineered IL6 binding polypeptide
VDAKYAKEERAAWFEIHLLPNLTATQIAAFISKLFDDPSQSSELLSEAKKLNDSQAPK

SEQ ID NO: 698 - protein, 58 aa, ARTIFICIAL SEQUENCE
  Engineered IL6 binding polypeptide
VDAKYAKEERAAWHEIHVLPNLTVDQMAAFISKLFDDPSQSSELLSEAKKLNDSQAPK

SEQ ID NO: 699 - protein, 58 aa, ARTIFICIAL SEQUENCE
  Engineered IL6 binding polypeptide
VDAKYAKEEARAWYEIHTLPNLTIHQMAAFISKLFDDPSQSSELLSEAKKLNDSQAPK

SEQ ID NO: 700 - protein, 58 aa, ARTIFICIAL SEQUENCE
  Engineered IL6 binding polypeptide
VDAKYAKEEAEAWFEIHALPNLTVHQMAAFIQKLFDDPSQSSELLSEAKKLNDSQAPK

SEQ ID NO: 701 - protein, 58 aa, ARTIFICIAL SEQUENCE
  Engineered IL6 binding polypeptide
VDAKYAKEERAAWYEIHSLPNLTTNQMAAFISKLFDDPSQSSELLSEAKKLNDSQAPK

SEQ ID NO: 702 - protein, 58 aa, ARTIFICIAL SEQUENCE
  Engineered IL6 binding polypeptide
VDAKYAKEEAKAWHEIHVLPNLTIEQRAAFISKLFDDPSQSSELLSEAKKLNDSQAPK

SEQ ID NO: 703 - protein, 58 aa, ARTIFICIAL SEQUENCE
  Engineered IL6 binding polypeptide
VDAKYAKEERTAWYEIHVLPNLTATQMAAFISKLFDDPSQSSELLSEAKKLNDSQAPK

SEQ ID NO: 704 - protein, 58 aa, ARTIFICIAL SEQUENCE
  Engineered IL6 binding polypeptide
VDAKYAKEERRAWWEIHLLPNLTVDQMSAFISKLFDDPSQSSELLSEAKKLNDSQAPK

SEQ ID NO: 705 - protein, 58 aa, ARTIFICIAL SEQUENCE
  Engineered IL6 binding polypeptide
VDAKYAKEEADAWREIHLLPNLTVTQTAAFISKLFDDPSQSSELLSEAKKLNDSQAPK

SEQ ID NO: 706 - protein, 58 aa, ARTIFICIAL SEQUENCE
  Engineered IL6 binding polypeptide
VDAKYAKEERDAWFEIHVLPNLTTEQMVAFISKLFDDPSQSSELLSEAKKLNDSQAPK

SEQ ID NO: 707 - protein, 58 aa, ARTIFICIAL SEQUENCE
  Engineered IL6 binding polypeptide
VDAKYAKEEQQAWYEIHVLPNLTVSQMAAFISKLFDDPSQSSELLSEAKKLNDSQAPK

SEQ ID NO: 708 - protein, 58 aa, ARTIFICIAL SEQUENCE
  Engineered IL6 binding polypeptide
VDAKYAKEERRAWFEIHALPNLTVNQMVAFISKLFDDPSQSSELLSEAKKLNDSQAPK

SEQ ID NO: 709 - protein, 58 aa, ARTIFICIAL SEQUENCE
  Engineered IL6 binding polypeptide
VDAKYAKEERKAWFEIHSLPNLTATQMHAFISKLFDDPSQSSELLSEAKKLNDSQAPK

SEQ ID NO: 710 - protein, 58 aa, ARTIFICIAL SEQUENCE
  Engineered IL6 binding polypeptide
VDAKYAKEEQQAWLEIHLLPNLTVEQMTAFIHKLYDDPSQSSELLSEAKKLNDSQAPK

SEQ ID NO: 711 - protein, 58 aa, ARTIFICIAL SEQUENCE
  Engineered IL6 binding polypeptide
VDAKYAKEEAEAWLEIHLLPNLTVHQMAAFISKLFDDPSQSSELLSEAKKLNDSQAPK

SEQ ID NO: 712 - protein, 58 aa, ARTIFICIAL SEQUENCE
  Engineered IL6 binding polypeptide
VDAKYAKEERDAWHEIHLLPNLTINQMTAFISKLFDDPSQSSELLSEAKKLNDSQAPK

SEQ ID NO: 713 - protein, 58 aa, ARTIFICIAL SEQUENCE
  Engineered IL6 binding polypeptide
VDAKYAKEERRAWYEIHILPNLTVHQMTAFIQKLLDDPSQSSELLSEAKKLNDSQAPK

SEQ ID NO: 714 - protein, 58 aa, ARTIFICIAL SEQUENCE
  Engineered IL6 binding polypeptide
VDAKYAKEEARAWHEIHLLPNLTVDQTTAFISKLFDDPSQSSELLSEAKKLNDSQAPK

SEQ ID NO: 715 - protein, 58 aa, ARTIFICIAL SEQUENCE
  Engineered IL6 binding polypeptide
VDAKYAKEERQAWREIHTLPNLTVHQMAAFISKLFDDPSQSSELLSEAKKLNDSQAPK

SEQ ID NO: 716 - protein, 58 aa, ARTIFICIAL SEQUENCE
  Engineered IL6 binding polypeptide
VDAKYAKEEHDAWREIHTLPNLTVSQMAAFISKLFDDPSQSSELLSEAKKLNDSQAPK

SEQ ID NO: 717 - protein, 58 aa, ARTIFICIAL SEQUENCE
  Engineered IL6 binding polypeptide
VDAKYAKEERAAWWEIHTLPNLTVHQMAAFISKLFDDPSQSSELLSEAKKLNDSQAPK

SEQ ID NO: 718 - protein, 58 aa, ARTIFICIAL SEQUENCE
  Engineered IL6 binding polypeptide
VDAKYAKEEAKAWHEIHALPNLTVSQMAAFISKLFDDPSQSSELLSEAKKLNDSQAPK

SEQ ID NO: 719 - protein, 58 aa, ARTIFICIAL SEQUENCE
  Engineered IL6 binding polypeptide
VDAKYAKEEAAAWWEIHTLPNLTVDQMAAFISKLFDDPSQSSELLSEAKKLNDSQAPK

SEQ ID NO: 720 - protein, 58 aa, ARTIFICIAL SEQUENCE
  Engineered IL6 binding polypeptide
VDAKYAKEERQAWFEIHKLPNLTVNQMAAFISKLFDDPSQSSELLSEAKKLNDSQAPK

SEQ ID NO: 721 - protein, 58 aa, ARTIFICIAL SEQUENCE
  Engineered IL6 binding polypeptide
VDAKYAKEERSAWREIHVLPNLTVNQRAAFISKLFDDPSQSSELLSEAKKLNDSQAPK

SEQ ID NO: 722 - protein, 58 aa, ARTIFICIAL SEQUENCE
  Engineered IL6 binding polypeptide
VDAKYAKEEAAAWHEIHLLPNLTVTQIAAFISKLFDDPSQSSELLSEAKKLNDSQAPK

SEQ ID NO: 723 - protein, 58 aa, ARTIFICIAL SEQUENCE
  Engineered IL6 binding polypeptide
VDAKYAKEEREAWAEIHKLPNLTATQMHAFISKLFDDPSQSSELLSEAKKLNDSQAPK

SEQ ID NO: 724 - protein, 58 aa, ARTIFICIAL SEQUENCE
  Engineered IL6 binding polypeptide
VDAKYAKEEQRAWSEIHSLPNLTVNQMAAFIMKLYDDPSQSSELLSEAKKLNDSQAPK

SEQ ID NO: 725 - protein, 58 aa, ARTIFICIAL SEQUENCE
  Engineered IL6 binding polypeptide
VDAKYAKEEAKAWWEIHVLPNLTIDQITAFIHKLYDDPSQSSELLSEAKKLNDSQAPK

SEQ ID NO: 726 - protein, 58 aa, ARTIFICIAL SEQUENCE
  Engineered IL6 binding polypeptide
VDAKYAKEEAQAWWEIHTLPNLTVDQMAAFISKLFDDPSQSSELLSEAKKLNDSQAPK

SEQ ID NO: 727 - protein, 58 aa, ARTIFICIAL SEQUENCE
  Engineered IL6 binding polypeptide
VDAKYAKEERRAWHEIHILPNLTTSQMAAFIQKLFDDPSQSSELLSEAKKLNDSQAPK

SEQ ID NO: 728 - protein, 58 aa, ARTIFICIAL SEQUENCE
  Engineered IL6 binding polypeptide
VDAKYAKEERSAWYEIHTLPNLTTNQRTAFISKLFDDPSQSSELLSEAKKLNDSQAPK

SEQ ID NO: 729 - protein, 58 aa, ARTIFICIAL SEQUENCE
  Engineered IL6 binding polypeptide
VDAKYAKEERRAWFEIHMLPNLTIDQMAAFISKLFDDPSQSSELLSEAKKLNDSQAPK

SEQ ID NO: 730 - protein, 58 aa, ARTIFICIAL SEQUENCE
  Engineered IL6 binding polypeptide
VDAKYAKEEAKAWYEIHALPNLTVDQMVAFITKLFDDPSQSSELLSEAKKLNDSQAPK

SEQ ID NO: 731 - protein, 58 aa, ARTIFICIAL SEQUENCE
  Engineered IL6 binding polypeptide
VDAKYAKEEHVAWLEIHLLPNLTAEQMAAFISKLYDDPSQSSELLSEAKKLNDSQAPK

SEQ ID NO: 732 - protein, 58 aa, ARTIFICIAL SEQUENCE
  Engineered IL6 binding polypeptide
VDAKYAKEERDAWFEIHALPNLTVQQMAAFISKLFDDPSQSSELLSEAKKLNDSQAPK

SEQ ID NO: 733 - protein, 58 aa, ARTIFICIAL SEQUENCE
  Engineered IL6 binding polypeptide
VDAKYAKEEARAWREIHLLPNLTVDQMAAFISKLFDDPSQSSELLSEAKKLNDSQAPK

SEQ ID NO: 734 - protein, 58 aa, ARTIFICIAL SEQUENCE
  Engineered IL6 binding polypeptide
VDAKYAKEEARAWWEIHMLPNLTINQMAAFISKLFDDPSQSSELLSEAKKLNDSQAPK

SEQ ID NO: 735 - protein, 58 aa, ARTIFICIAL SEQUENCE
  Engineered IL6 binding polypeptide
VDAKYAKEEAAAWLEIHKLPNLTVHQMAAFISKLFDDPSQSSELLSEAKKLNDSQAPK

SEQ ID NO: 736 - protein, 58 aa, ARTIFICIAL SEQUENCE
  Engineered IL6 binding polypeptide
VDAKYAKEERQAWFEIHVLPNLTTDQMAAFIHKLYDDPSQSSELLSEAKKLNDSQAPK

SEQ ID NO: 737 - protein, 58 aa, ARTIFICIAL SEQUENCE
  Engineered IL6 binding polypeptide
VDAKYAKEEQRAWTEIHLLPNLTVNQMAAFISKLFDDPSQSSELLSEAKKLNDSQAPK

SEQ ID NO: 738 - protein, 58 aa, ARTIFICIAL SEQUENCE
  Engineered IL6 binding polypeptide
VDAKYAKEEQQAWYEIHTLPNLTVQQMAAFIQKLFDDPSQSSELLSEAKKLNDSQAPK

SEQ ID NO: 739 - protein, 58 aa, ARTIFICIAL SEQUENCE
  Engineered IL6 binding polypeptide
VDAKYAKEEQHAWREIHILPNLTVTQIAAFISKLFDDPSQSSELLSEAKKLNDSQAPK

SEQ ID NO: 740 - protein, 58 aa, ARTIFICIAL SEQUENCE
  Engineered IL6 binding polypeptide
VDAKYAKEEQRAWYEIHLLPNLTVTQMAAFISKLFDDPSQSSELLSEAKKLNDSQAPK

SEQ ID NO: 741 - protein, 58 aa, ARTIFICIAL SEQUENCE
  Engineered IL6 binding polypeptide
VDAKYAKEERAAWFEIHSLPNLTVSQMAAFISKLFDDPSQSSELLSEAKKLNDSQAPK

SEQ ID NO: 742 - protein, 58 aa, ARTIFICIAL SEQUENCE
  Engineered IL6 binding polypeptide
VDAKYAKEERQAWYEIHILPNLTAEQMAAFISKLFDDPSQSSELLSEAKKLNDSQAPK

SEQ ID NO: 743 - protein, 58 aa, ARTIFICIAL SEQUENCE
  Engineered IL6 binding polypeptide
VDAKYAKEEAQAWWEIHVLPNLTVRQIVAFISKLFDDPSQSSELLSEAKKLNDSQAPK

SEQ ID NO: 744 - protein, 58 aa, ARTIFICIAL SEQUENCE
  Engineered IL6 binding polypeptide
VDAKYAKEERRAWFEIHTLPNLTVHQMTAFIQKLFDDPSQSSELLSEAKKLNDSQAPK

SEQ ID NO: 745 - protein, 58 aa, ARTIFICIAL SEQUENCE
  Engineered IL6 binding polypeptide
VDAKYAKEEQRAWHEIHLLPNLTTRQMAAFISKLFDDPSQSSELLSEAKKLNDSQAPK

SEQ ID NO: 746 - protein, 58 aa, ARTIFICIAL SEQUENCE
  Engineered IL6 binding polypeptide
VDAKYAKEERHAWHEIHILPNLTIEQMVAFISKLFDDPSQSSELLSEAKKLNDSQAPK

SEQ ID NO: 747 - protein, 58 aa, ARTIFICIAL SEQUENCE
  Engineered IL6 binding polypeptide
VDAKYAKEERQAWFEIHALPNLTVQQVEAFISKLFDDPSQSSELLSEAKKLNDSQAPK

SEQ ID NO: 748 - protein, 58 aa, ARTIFICIAL SEQUENCE
  Engineered IL6 binding polypeptide
VDAKYAKEEQRAWREIHLLPNLTVTQMAAFISKLFDDPSQSSELLSEAKKLNDSQAPK

SEQ ID NO: 749 - protein, 58 aa, ARTIFICIAL SEQUENCE
  Engineered IL6 binding polypeptide
VDAKYAKEERHAWWEIHSLPNLTISQMAAFISKLFDDPSQSSELLSEAKKLNDSQAPK

SEQ ID NO: 750 - protein, 58 aa, ARTIFICIAL SEQUENCE
  Engineered IL6 binding polypeptide
VDAKYAKEEARAWLEIHALPNLTVDQMAAFISKLFDDPSQSSELLSEAKKLNDSQAPK

SEQ ID NO: 751 - protein, 58 aa, ARTIFICIAL SEQUENCE
  Engineered IL6 binding polypeptide
VDAKYAKEEQRAWHEIHTLPNLTVRQMAAFIIKLFDDPSQSSELLSEAKKLNDSQAPK

SEQ ID NO: 752 - protein, 58 aa, ARTIFICIAL SEQUENCE
  Engineered IL6 binding polypeptide
VDAKYAKEERHAWFEIHKLPNLTVEQMAAFIWKLFDDPSQSSELLSEAKKLNDSQAPK

SEQ ID NO: 753 - protein, 58 aa, ARTIFICIAL SEQUENCE
  Engineered IL6 binding polypeptide
VDAKYAKEERDAWYEIHLLPNLTINQIAAFISKLFDDPSQSSELLSEAKKLNDSQAPK

SEQ ID NO: 754 - protein, 58 aa, ARTIFICIAL SEQUENCE
  Engineered IL6 binding polypeptide
VDAKYAKEERQAWHEIHILPNLTVTQMTAFISKLFDDPSQSSELLSEAKKLNDSQAPK

SEQ ID NO: 755 - protein, 58 aa, ARTIFICIAL SEQUENCE
  Engineered IL6 binding polypeptide
VDAKYAKEERQAWTEIHSLPNLTATQVAAFIQKLFDDPSQSSELLSEAKKLNDSQAPK

SEQ ID NO: 756 - protein, 58 aa, ARTIFICIAL SEQUENCE
  Engineered IL6 binding polypeptide
VDAKYAKEEREAWWEIHHLPNLTVHQRAAFISKLFDDPSQSSELLSEAKKLNDSQAPK

SEQ ID NO: 757 - protein, 58 aa, ARTIFICIAL SEQUENCE
  Engineered IL6 binding polypeptide
VDAKYAKEERAAWYEIHTLPNLTVSQMTAFISKLFDDPSQSSELLSEAKKLNDSQAPK

SEQ ID NO: 758 - protein, 58 aa, ARTIFICIAL SEQUENCE
  Engineered IL6 binding polypeptide
VDAKYAKEEHQAWWEIHLLPNLTARQMEAFIQKLFDDPSQSSELLSEAKKLNDSQAPK

SEQ ID NO: 759 - protein, 58 aa, ARTIFICIAL SEQUENCE
  Engineered IL6 binding polypeptide
VDAKYAKEEAHAWTEIHLLPNLTVDQMVAFISKLFDDPSQSSELLSEAKKLNDSQAPK

SEQ ID NO: 760 - protein, 58 aa, ARTIFICIAL SEQUENCE
  Engineered IL6 binding polypeptide
VDAKYAKEERRAWHEIHLLPNLTIQQIAAFISKLFDDPSQSSELLSEAKKLNDSQAPK

SEQ ID NO: 761 - protein, 58 aa, ARTIFICIAL SEQUENCE
  Engineered IL6 binding polypeptide
VDAKYAKEEHDAWFEIHTLPNLTVEQMAAFIMKLFDDPSQSSELLSEAKKLNDSQAPK

SEQ ID NO: 762 - protein, 58 aa, ARTIFICIAL SEQUENCE
  Engineered IL6 binding polypeptide
VDAKYAKEEHRAWLEIHLLPNLTVRQMAAFISKLFDDPSQSSELLSEAKKLNDSQAPK

SEQ ID NO: 763 - protein, 58 aa, ARTIFICIAL SEQUENCE
  Engineered IL6 binding polypeptide
VDAKYAKEEAKAWWEIHLLPNLTVDQMAAFISKLFDDPSQSSELLSEAKKLNDSQAPK

SEQ ID NO: 764 - protein, 58 aa, ARTIFICIAL SEQUENCE
  Engineered IL6 binding polypeptide
VDAKYAKEERKAWHEIHVLPNLTTNQRVAFIMKLMDDPSQSSELLSEAKKLNDSQAPK

SEQ ID NO: 765 - protein, 58 aa, ARTIFICIAL SEQUENCE
  Engineered IL6 binding polypeptide
VDAKYAKEERRAWWEIHILPNLTVEQAAAFISKLFDDPSQSSELLSEAKKLNDSQAPK

SEQ ID NO: 766 - protein, 58 aa, ARTIFICIAL SEQUENCE
  Engineered IL6 binding polypeptide
VDAKYAKEEAAAWYEIHTLPNLTIDQMAAFISKLFDDPSQSSELLSEAKKLNDSQAPK

SEQ ID NO: 767 - protein, 58 aa, ARTIFICIAL SEQUENCE
  Engineered IL6 binding polypeptide
VDAKYAKEERAAWFEIHKLPNLTVSQMAAFIQKLFDDPSQSSELLSEAKKLNDSQAPK

SEQ ID NO: 768 - protein, 58 aa, ARTIFICIAL SEQUENCE
  Engineered IL6 binding polypeptide
VDAKYAKEEAEAWTEIHKLPNLTVHQMTAFIIKLFDDPSQSSELLSEAKKLNDSQAPK

SEQ ID NO: 769 - protein, 58 aa, ARTIFICIAL SEQUENCE
  Engineered IL6 binding polypeptide
VDAKYAKEERHAWWEIHKLPNLTISQMAAFISKLFDDPSQSSELLSEAKKLNDSQAPK

SEQ ID NO: 770 - protein, 58 aa, ARTIFICIAL SEQUENCE
  Engineered IL6 binding polypeptide
VDAKYAKEERKAWYEIHLLPNLTTSQRVAFISKLFDDPSQSSELLSEAKKLNDSQAPK

SEQ ID NO: 771 - protein, 58 aa, ARTIFICIAL SEQUENCE
  Engineered IL6 binding polypeptide
VDAKYAKEEASAWWEIHVLPNLTVNQIAAFISKLFDDPSQSSELLSEAKKLNDSQAPK

SEQ ID NO: 772 - protein, 58 aa, ARTIFICIAL SEQUENCE
  Engineered IL6 binding polypeptide
VDAKYAKEERDAWYEIHLLPNLTTDQMAAFISKLFDDPSQSSELLSEAKKLNDSQAPK

SEQ ID NO: 773 - protein, 58 aa, ARTIFICIAL SEQUENCE
  Engineered IL6 binding polypeptide
VDAKYAKEEAEAWLEIHLLPNLTVQQMAAFISKLFDDPSQSSELLSEAKKLNDSQAPK

SEQ ID NO: 774 - protein, 58 aa, ARTIFICIAL SEQUENCE
  Engineered IL6 binding polypeptide
VDAKYAKEEAKAWHEIHVLPNLTVRQIAAFISKLFDDPSQSSELLSEAKKLNDSQAPK

SEQ ID NO: 775 - protein, 58 aa, ARTIFICIAL SEQUENCE
  Engineered IL6 binding polypeptide
VDAKYAKEEASAWFEIHTLPNLTVDQMSAFIIKLFDDPSQSSELLSEAKKLNDSQAPK

SEQ ID NO: 776 - protein, 58 aa, ARTIFICIAL SEQUENCE
  Engineered IL6 binding polypeptide
VDAKYAKEERKAWYEIHVLPNLTVEQIAAFISKLFDDPSQSSELLSEAKKLNDSQAPK

SEQ ID NO: 777 - protein, 58 aa, ARTIFICIAL SEQUENCE
  Engineered IL6 binding polypeptide
VDAKYAKEERAAWHEIHVLPNLTTEQRVAFIIKLYDDPSQSSELLSEAKKLNDSQAPK

SEQ ID NO: 778 - protein, 58 aa, ARTIFICIAL SEQUENCE
  Engineered IL6 binding polypeptide
VDAKYAKEEAQAWYEIHVLPNLTVRQMVAFISKLFDDPSQSSELLSEAKKLNDSQAPK

SEQ ID NO: 779 - protein, 58 aa, ARTIFICIAL SEQUENCE
  Engineered IL6 binding polypeptide
VDAKYAKEEAQAWWEIHLLPNLTVRQIAAFISKLFDDPSQSSELLSEAKKLNDSQAPK

SEQ ID NO: 780 - protein, 58 aa, ARTIFICIAL SEQUENCE
  Engineered IL6 binding polypeptide
VDAKYAKEEAAAWTEIHALPNLTVHQMAAFISKLFDDPSQSSELLSEAKKLNDSQAPK

SEQ ID NO: 781 - protein, 58 aa, ARTIFICIAL SEQUENCE
  Engineered IL6 binding polypeptide
VDAKYAKEERTAWWEIHALPNLTIDQMAAFIIKLYDDPSQSSELLSEAKKLNDSQAPK

SEQ ID NO: 782 - protein, 58 aa, ARTIFICIAL SEQUENCE
  Engineered IL6 binding polypeptide
VDAKYAKEEHKAWREIHLLPNLTTEQMTAFISKLFDDPSQSSELLSEAKKLNDSQAPK

SEQ ID NO: 783 - protein, 58 aa, ARTIFICIAL SEQUENCE
  Engineered IL6 binding polypeptide
VDAKYAKEEQRAWREIHLLPNLTVNQMAAFITKLFDDPSQSSELLSEAKKLNDSQAPK

SEQ ID NO: 784 - protein, 58 aa, ARTIFICIAL SEQUENCE
  Engineered IL6 binding polypeptide
VDAKYAKEERHAWWEIHKLPNLTIRQMAAFISKLFDDPSQSSELLSEAKKLNDSQAPK

SEQ ID NO: 785 - protein, 58 aa, ARTIFICIAL SEQUENCE
  Engineered IL6 binding polypeptide
VDAKYAKEEARAWHEIHILPNLTVRQISAFISKLFDDPSQSSELLSEAKKLNDSQAPK

SEQ ID NO: 786 - protein, 58 aa, ARTIFICIAL SEQUENCE
  Engineered IL6 binding polypeptide
VDAKYAKEERQAWFEIHALPNLTVNQMAAFIIKLYDDPSQSSELLSEAKKLNDSQAPK

SEQ ID NO: 787 - protein, 58 aa, ARTIFICIAL SEQUENCE
  Engineered IL6 binding polypeptide
VDAKYAKEEAQAWSEIHLLPNLTIDQRVAFISKLFDDPSQSSELLSEAKKLNDSQAPK

SEQ ID NO: 788 - protein, 58 aa, ARTIFICIAL SEQUENCE
  Engineered IL6 binding polypeptide
VDAKYAKEERHAWHEIHILPNLTINQMAAFISKLFDDPSQSSELLSEAKKLNDSQAPK

SEQ ID NO: 789 - protein, 58 aa, ARTIFICIAL SEQUENCE
  Engineered IL6 binding polypeptide
VDAKYAKEEAKAWAEIHALPNLTVTQMSAFIQKLFDDPSQSSELLSEAKKLNDSQAPK

SEQ ID NO: 790 - protein, 58 aa, ARTIFICIAL SEQUENCE
  Engineered IL6 binding polypeptide
VDAKYAKEERQAWFEIHILPNLTATQMAAFISKLFDDPSQSSELLSEAKKLNDSQAPK

SEQ ID NO: 791 - protein, 58 aa, ARTIFICIAL SEQUENCE
  Engineered IL6 binding polypeptide
VDAKYAKEERRAWHEIHVLPNLTVRQMAAFISKLFDDPSQSSELLSEAKKLNDSQAPK

SEQ ID NO: 792 - protein, 58 aa, ARTIFICIAL SEQUENCE
  Engineered IL6 binding polypeptide
VDAKYAKEEAHAWFEIHILPNLTIDQRSAFISKLFDDPSQSSELLSEAKKLNDSQAPK

SEQ ID NO: 793 - protein, 58 aa, ARTIFICIAL SEQUENCE
  Engineered IL6 binding polypeptide
VDAKYAKEEARAWWEIHLLPNLTIRQMTAFISKLFDDPSQSSELLSEAKKLNDSQAPK

SEQ ID NO: 794 - protein, 58 aa, ARTIFICIAL SEQUENCE
  Engineered IL6 binding polypeptide
VDAKYAKEEAEAWHEIHVLPNLTVSQMAAFISKLFDDPSQSSELLSEAKKLNDSQAPK

SEQ ID NO: 795 - protein, 58 aa, ARTIFICIAL SEQUENCE
  Engineered IL6 binding polypeptide
VDAKYAKEERQAWREIHLLPNLTTDQMSAFISKLFDDPSQSSELLSEAKKLNDSQAPK

SEQ ID NO: 796 - protein, 58 aa, ARTIFICIAL SEQUENCE
  Engineered IL6 binding polypeptide
VDAKYAKEEATAWREIHLLPNLTVDQMAAFISKLFDDPSQSSELLSEAKKLNDSQAPK

SEQ ID NO: 797 - protein, 58 aa, ARTIFICIAL SEQUENCE
  Engineered IL6 binding polypeptide
VDAKYAKEERQAWWEIHKLPNLTVTQMAAFISKLFDDPSQSSELLSEAKKLNDSQAPK

SEQ ID NO: 798 - protein, 58 aa, ARTIFICIAL SEQUENCE
  Engineered IL6 binding polypeptide
VDAKYAKEEARAWREIHLLPNLTISQMAAFISKLFDDPSQSSELLSEAKKLNDSQAPK

SEQ ID NO: 799 - protein, 58 aa, ARTIFICIAL SEQUENCE
  Engineered IL6 binding polypeptide
VDAKYAKEEAEAWHEIHVLPNLTVEQMAAFISKLFDDPSQSSELLSEAKKLNDSQAPK

SEQ ID NO: 800 - protein, 58 aa, ARTIFICIAL SEQUENCE
  Engineered IL6 binding polypeptide
VDAKYAKEEAAAWLEIHLLPNLTIDQMAAFISKLFDDPSQSSELLSEAKKLNDSQAPK

SEQ ID NO: 801 - protein, 58 aa, ARTIFICIAL SEQUENCE
  Engineered IL6 binding polypeptide
VDAKYAKEERDAWYEIHLLPNLTVQQMSAFISKLFDDPSQSSELLSEAKKLNDSQAPK

SEQ ID NO: 802 - protein, 58 aa, ARTIFICIAL SEQUENCE
  Engineered IL6 binding polypeptide
VDAKYAKEERAAWFEIHTLPNLTVHQMAAFISKLFDDPSQSSELLSEAKKLNDSQAPK

SEQ ID NO: 803 - protein, 58 aa, ARTIFICIAL SEQUENCE
  Engineered IL6 binding polypeptide
VDAKYAKEEQSAWHEIHTLPNLTVNQMAAFIIKLFDDPSQSSELLSEAKKLNDSQAPK

SEQ ID NO: 804 - protein, 58 aa, ARTIFICIAL SEQUENCE
  Engineered IL6 binding polypeptide
VDAKYAKEERSAWFEIHILPNLTVRQMAAFIQKLFDDPSQSSELLSEAKKLNDSQAPK

SEQ ID NO: 805 - protein, 58 aa, ARTIFICIAL SEQUENCE
  Engineered IL6 binding polypeptide
VDAKYAKEEAQAWHEIHVLPNLTVNQMAAFISKLFDDPSQSSELLSEAKKLNDSQAPK

SEQ ID NO: 806 - protein, 58 aa, ARTIFICIAL SEQUENCE
  Engineered IL6 binding polypeptide
VDAKYAKEEAHAWREIHLLPNLTVSQMAAFIIKLFDDPSQSSELLSEAKKLNDSQAPK

SEQ ID NO: 807 - protein, 58 aa, ARTIFICIAL SEQUENCE
  Engineered IL6 binding polypeptide
VDAKYAKEEARAWREIHLLPNLTVQQMAAFIQKLFDDPSQSSELLSEAKKLNDSQAPK

SEQ ID NO: 808 - protein, 58 aa, ARTIFICIAL SEQUENCE
  Engineered IL6 binding polypeptide
VDAKYAKEERQAWYEIHMLPNLTITQLEAFISKLFDDPSQSSELLSEAKKLNDSQAPK

SEQ ID NO: 809 - protein, 58 aa, ARTIFICIAL SEQUENCE
  Engineered IL6 binding polypeptide
VDAKYAKEEREAWYEIHVLPNLTHHQMEAFIQKLFDDPSQSSELLSEAKKLNDSQAPK

SEQ ID NO: 810 - protein, 58 aa, ARTIFICIAL SEQUENCE
  Engineered IL6 binding polypeptide
VDAKYAKEERRAWFEIHLLPNLTVTQISAFISKLFDDPSQSSELLSEAKKLNDSQAPK

SEQ ID NO: 811 - protein, 58 aa, ARTIFICIAL SEQUENCE
  Engineered IL6 binding polypeptide
VDAKYAKEEREAWFEIHALPNLTVDQMSAFIIKLYDDPSQSSELLSEAKKLNDSQAPK

SEQ ID NO: 812 - protein, 58 aa, ARTIFICIAL SEQUENCE
  Engineered IL6 binding polypeptide
VDAKYAKEEREAWWEIHLLPNLTVEQMAAFIHKLYDDPSQSSELLSEAKKLNDSQAPK

SEQ ID NO: 813 - protein, 58 aa, ARTIFICIAL SEQUENCE
  Engineered IL6 binding polypeptide
VDAKYAKEEREAWHEIHTLPNLTVHQRAAFISKLFDDPSQSSELLSEAKKLNDSQAPK

SEQ ID NO: 814 - protein, 58 aa, ARTIFICIAL SEQUENCE
  Engineered IL6 binding polypeptide
VDAKYAKEEAQAWHEIHTLPNLTVDQMAAFISKLFDDPSQSSELLSEAKKLNDSQAPK

SEQ ID NO: 815 - protein, 58 aa, ARTIFICIAL SEQUENCE
  Engineered IL6 binding polypeptide
VDAKYAKEEQHAWYEIHILPNLTVTQMAAFISKLFDDPSQSSELLSEAKKLNDSQAPK

SEQ ID NO: 816 - protein, 58 aa, ARTIFICIAL SEQUENCE
  Engineered IL6 binding polypeptide
VDAKYAKEEHHAWYEIHTLPNLTIQQMAAFISKLFDDPSQSSELLSEAKKLNDSQAPK

SEQ ID NO: 817 - protein, 58 aa, ARTIFICIAL SEQUENCE
  Engineered IL6 binding polypeptide
VDAKYAKEEAHAWYEIHLLPNLTVNQMAAFIQKLFDDPSQSSELLSEAKKLNDSQAPK

SEQ ID NO: 818 - protein, 58 aa, ARTIFICIAL SEQUENCE
  Engineered IL6 binding polypeptide
VDAKYAKEEAAAWREIHTLPNLTAEQMAAFISKLFDDPSQSSELLSEAKKLNDSQAPK

SEQ ID NO: 819 - protein, 58 aa, ARTIFICIAL SEQUENCE
  Engineered IL6 binding polypeptide
VDAKYAKEEASAWYEIHLLPNLTVEQMAAFISKLFDDPSQSSELLSEAKKLNDSQAPK

SEQ ID NO: 820 - protein, 58 aa, ARTIFICIAL SEQUENCE
  Engineered IL6 binding polypeptide
VDAKYAKEERKAWYEIHVLPNLTVDQMAAFIQKLFDDPSQSSELLSEAKKLNDSQAPK

SEQ ID NO: 821 - protein, 58 aa, ARTIFICIAL SEQUENCE
  Engineered IL6 binding polypeptide
VDAKYAKEEAHAWHEIHILPNLTVNQIAAFISKLFDDPSQSSELLSEAKKLNDSQAPK

SEQ ID NO: 822 - protein, 58 aa, ARTIFICIAL SEQUENCE
  Engineered IL6 binding polypeptide
VDAKYAKEERRAWAEIHKLPNLTISQIAAFISKLFDDPSQSSELLSEAKKLNDSQAPK

SEQ ID NO: 823 - protein, 58 aa, ARTIFICIAL SEQUENCE
  Engineered IL6 binding polypeptide
VDAKYAKEEAHAWLEIHALPNLTIEQISAFIIKLYDDPSQSSELLSEAKKLNDSQAPK

SEQ ID NO: 824 - protein, 58 aa, ARTIFICIAL SEQUENCE
  Engineered IL6 binding polypeptide
VDAKYAKEERTAWYEIHILPNLTIQQMAAFISKLFDDPSQSSELLSEAKKLNDSQAPK

SEQ ID NO: 825 - protein, 58 aa, ARTIFICIAL SEQUENCE
  Engineered IL6 binding polypeptide
VDAKYAKEERHAWYEIHLLPNLTVTQMAAFISKLFDDPSQSSELLSEAKKLNDSQAPK

SEQ ID NO: 826 - protein, 58 aa, ARTIFICIAL SEQUENCE
  Engineered IL6 binding polypeptide
VDAKYAKEERRAWYEIHLLPNLTVEQIAAFISKLFDDPSQSSELLSEAKKLNDSQAPK

SEQ ID NO: 827 - protein, 58 aa, ARTIFICIAL SEQUENCE
  Engineered IL6 binding polypeptide
VDAKYAKEERDAWFEIHALPNLTVTQVAAFISKLFDDPSQSSELLSEAKKLNDSQAPK

SEQ ID NO: 828 - protein, 58 aa, ARTIFICIAL SEQUENCE
  Engineered IL6 binding polypeptide
VDAKYAKEEQEAWTEIHTLPNLTIDQMTAFIIKLFDDPSQSSELLSEAKKLNDSQAPK

SEQ ID NO: 829 - protein, 58 aa, ARTIFICIAL SEQUENCE
  Engineered IL6 binding polypeptide
VDAKYAKEEREAWWEIHALPNLTTNQIAAFISKLFDDPSQSSELLSEAKKLNDSQAPK

SEQ ID NO: 830 - protein, 58 aa, ARTIFICIAL SEQUENCE
  Engineered IL6 binding polypeptide
VDAKYAKEERAAWYEIHLLPNLTVNQMAAFISKLFDDPSQSSELLSEAKKLNDSQAPK

SEQ ID NO: 831 - protein, 58 aa, ARTIFICIAL SEQUENCE
  Engineered IL6 binding polypeptide
VDAKYAKEEAKAWYEIHILPNLTVTQIAAFISKLFDDPSQSSELLSEAKKLNDSQAPK

SEQ ID NO: 832 - protein, 58 aa, ARTIFICIAL SEQUENCE
  Engineered IL6 binding polypeptide
VDAKYAKEEREAWHEIHILPNLTVNQMAAFISKLFDDPSQSSELLSEAKKLNDSQAPK

SEQ ID NO: 833 - protein, 58 aa, ARTIFICIAL SEQUENCE
  Engineered IL6 binding polypeptide
VDAKYAKEERAAWREIHLLPNLTVSQMEAFISKLFDDPSQSSELLSEAKKLNDSQAPK

SEQ ID NO: 834 - protein, 58 aa, ARTIFICIAL SEQUENCE
  Engineered IL6 binding polypeptide
VDAKYAKEERTAWFEIHTLPNLTVQQMAAFIIKLFDDPSQSSELLSEAKKLNDSQAPK

SEQ ID NO: 835 - protein, 58 aa, ARTIFICIAL SEQUENCE
  Engineered IL6 binding polypeptide
VDAKYAKEEREAWHEIHILPNLTIEQMAAFIQKLFDDPSQSSELLSEAKKLNDSQAPK

SEQ ID NO: 836 - protein, 58 aa, ARTIFICIAL SEQUENCE
  Engineered IL6 binding polypeptide
VDAKYAKEERQAWYEIHILPNLTVRQISAFISKLFDDPSQSSELLSEAKKLNDSQAPK

SEQ ID NO: 837 - protein, 58 aa, ARTIFICIAL SEQUENCE
  Engineered IL6 binding polypeptide
VDAKYAKEEAQAWTEIHILPNLTVSQMAAFIQKLFDDPSQSSELLSEAKKLNDSQAPK

SEQ ID NO: 838 - protein, 58 aa, ARTIFICIAL SEQUENCE
  Engineered IL6 binding polypeptide
VDAKYAKEEHDAWYEIHTLPNLTVDQVSAFISKLFDDPSQSSELLSEAKKLNDSQAPK

SEQ ID NO: 839 - protein, 58 aa, ARTIFICIAL SEQUENCE
  Engineered IL6 binding polypeptide
VDAKYAKEEAEAWREIHLLPNLTINQIAAFISKLFDDPSQSSELLSEAKKLNDSQAPK

SEQ ID NO: 840 - protein, 58 aa, ARTIFICIAL SEQUENCE
  Engineered IL6 binding polypeptide
VDAKYAKEEQSAWTEIHTLPNLTTDQRVAFISKLFDDPSQSSELLSEAKKLNDSQAPK

SEQ ID NO: 841 - protein, 58 aa, ARTIFICIAL SEQUENCE
  Engineered IL6 binding polypeptide
VDAKYAKEERDAWHEIHLLPNLTIEQRAAFISKLFDDPSQSSELLSEAKKLNDSQAPK

SEQ ID NO: 842 - protein, 58 aa, ARTIFICIAL SEQUENCE
  Engineered IL6 binding polypeptide
VDAKYAKEEARAWHEIHVLPNLTTDQRVAFISKLFDDPSQSSELLSEAKKLNDSQAPK

SEQ ID NO: 843 - protein, 58 aa, ARTIFICIAL SEQUENCE
  Engineered IL6 binding polypeptide
VDAKYAKEEADAWFEIHMLPNLTIDQMTAFIMKLFDDPSQSSELLSEAKKLNDSQAPK

SEQ ID NO: 844 - protein, 58 aa, ARTIFICIAL SEQUENCE
  Engineered IL6 binding polypeptide
VDAKYAKEEAEAWWEIHALPNLTVSQTAAFISKLFDDPSQSSELLSEAKKLNDSQAPK

SEQ ID NO: 845 - protein, 58 aa, ARTIFICIAL SEQUENCE
  Engineered IL6 binding polypeptide
VDAKYAKEERDAWFEIHALPNLTISQMTAFIIKLYDDPSQSSELLSEAKKLNDSQAPK

SEQ ID NO: 846 - protein, 58 aa, ARTIFICIAL SEQUENCE
  Engineered IL6 binding polypeptide
VDAKYAKEERRAWYEIHTLPNLTVSQMAAFISKLFDDPSQSSELLSEAKKLNDSQAPK

SEQ ID NO: 847 - protein, 58 aa, ARTIFICIAL SEQUENCE
  Engineered IL6 binding polypeptide
VDAKYAKEEREAWYEIHLLPNLTTRQMAAFIIKLFDDPSQSSELLSEAKKLNDSQAPK

SEQ ID NO: 848 - protein, 58 aa, ARTIFICIAL SEQUENCE
  Engineered IL6 binding polypeptide
VDAKYAKEEHDAWYEIHVLPNLTVNQIAAFISKLFDDPSQSSELLSEAKKLNDSQAPK

SEQ ID NO: 849 - protein, 58 aa, ARTIFICIAL SEQUENCE
  Engineered IL6 binding polypeptide
VDAKYAKEEAHAWAEIHSLPNLTVDQMVAFIQKLFDDPSQSSELLSEAKKLNDSQAPK

SEQ ID NO: 850 - protein, 58 aa, ARTIFICIAL SEQUENCE
  Engineered IL6 binding polypeptide
VDAKYAKEEREAWWEIHKLPNLTVTQMAAFIQKLFDDPSQSSELLSEAKKLNDSQAPK

SEQ ID NO: 851 - protein, 58 aa, ARTIFICIAL SEQUENCE
  Engineered IL6 binding polypeptide
VDAKYAKEERVAWYEIHLLPNLTIDQMAAFISKLFDDPSQSSELLSEAKKLNDSQAPK

SEQ ID NO: 852 - protein, 58 aa, ARTIFICIAL SEQUENCE
  Engineered IL6 binding polypeptide
VDAKYAKEEARAWHEIHILPNLTVSQITAFISKLFDDPSQSSELLSEAKKLNDSQAPK

SEQ ID NO: 853 - protein, 58 aa, ARTIFICIAL SEQUENCE
  Engineered IL6 binding polypeptide
VDAKYAKEEADAWREIHLLPNLTASQMAAFISKLFDDPSQSSELLSEAKKLNDSQAPK

SEQ ID NO: 854 - protein, 58 aa, ARTIFICIAL SEQUENCE
  Engineered IL6 binding polypeptide
VDAKYAKEEREAWTEIHSLPNLTVDQMAAFIIKLYDDPSQSSELLSEAKKLNDSQAPK

SEQ ID NO: 855 - protein, 58 aa, ARTIFICIAL SEQUENCE
  Engineered IL6 binding polypeptide
VDAKYAKEERRAWYEIHLLPNLTIEQMAAFISKLFDDPSQSSELLSEAKKLNDSQAPK

SEQ ID NO: 856 - protein, 58 aa, ARTIFICIAL SEQUENCE
  Engineered IL6 binding polypeptide
VDAKYAKEEREAWYEIHLLPNLTIDQMAAFISKLFDDPSQSSELLSEAKKLNDSQAPK

SEQ ID NO: 857 - protein, 58 aa, ARTIFICIAL SEQUENCE
  Engineered IL6 binding polypeptide
VDAKYAKEEARAWYEIHILPNLTVSQMAAFISKLFDDPSQSSELLSEAKKLNDSQAPK

SEQ ID NO: 858 - protein, 58 aa, ARTIFICIAL SEQUENCE
  Engineered IL6 binding polypeptide
VDAKYAKEERQAWHEIHTLPNLTTDQMAAFISKLFDDPSQSSELLSEAKKLNDSQAPK

SEQ ID NO: 859 - protein, 58 aa, ARTIFICIAL SEQUENCE
  Engineered IL6 binding polypeptide
VDAKYAKEEHDAWWEIHKLPNLTVNQTAAFISKLFDDPSQSSELLSEAKKLNDSQAPK

SEQ ID NO: 860 - protein, 58 aa, ARTIFICIAL SEQUENCE
  Engineered IL6 binding polypeptide
VDAKYAKEERTAWHEIHSLPNLTIDQMAAFIIKLFDDPSQSSELLSEAKKLNDSQAPK

SEQ ID NO: 861 - protein, 58 aa, ARTIFICIAL SEQUENCE
  Engineered IL6 binding polypeptide
VDAKYAKEERAAWWEIHLLPNLTTTQMAAFISKLFDDPSQSSELLSEAKKLNDSQAPK

SEQ ID NO: 862 - protein, 58 aa, ARTIFICIAL SEQUENCE
  Engineered IL6 binding polypeptide
VDAKYAKEERDAWREIHLLPNLTIDQMAAFISKLFDDPSQSSELLSEAKKLNDSQAPK

SEQ ID NO: 863 - protein, 58 aa, ARTIFICIAL SEQUENCE
  Engineered IL6 binding polypeptide
VDAKYAKEEQVAWHEIHLLPNLTIDQMTAFISKLFDDPSQSSELLSEAKKLNDSQAPK

SEQ ID NO: 864 - protein, 58 aa, ARTIFICIAL SEQUENCE
  Engineered IL6 binding polypeptide
VDAKYAKEEAQAWREIHLLPNLTVDQMAAFISKLFDDPSQSSELLSEAKKLNDSQAPK

SEQ ID NO: 865 - protein, 58 aa, ARTIFICIAL SEQUENCE
  Engineered IL6 binding polypeptide
VDAKYAKEEAKAWFEIHILPNLTVQQVAAFISKLFDDPSQSSELLSEAKKLNDSQAPK

SEQ ID NO: 866 - protein, 58 aa, ARTIFICIAL SEQUENCE
  Engineered IL6 binding polypeptide
VDAKYAKEEHAAWREITLLPNLTINQRAAFISKLFDDPSQSSELLSEAKKLNDSQAPK

SEQ ID NO: 867 - protein, 58 aa, ARTIFICIAL SEQUENCE
  Engineered IL6 binding polypeptide
VDAKYAKEEAEAWSEIHKLPNLTVTQMAAFISKLFDDPSQSSELLSEAKKLNDSQAPK

SEQ ID NO: 868 - protein, 58 aa, ARTIFICIAL SEQUENCE
  Engineered IL6 binding polypeptide
VDAKYAKEEQQAWYEIHLLPNLTVTQMSAFISKLFDDPSQSSELLSEAKKLNDSQAPK

SEQ ID NO: 869 - protein, 58 aa, ARTIFICIAL SEQUENCE
  Engineered IL6 binding polypeptide
VDAKYAKEEARAWYEIHLLPNLTIEQMAAFISKLFDDPSQSSELLSEAKKLNDSQAPK

SEQ ID NO: 870 - protein, 58 aa, ARTIFICIAL SEQUENCE
  Engineered IL6 binding polypeptide
VDAKYAKEEAEAWTEIHLLPNLTVEQRVAFISKLFDDPSQSSELLSEAKKLNDSQAPK

SEQ ID NO: 871 - protein, 58 aa, ARTIFICIAL SEQUENCE
  Engineered IL6 binding polypeptide
VDAKYAKEERQAWTEIHLLPNLTVEQMAAFIQKLFDDPSQSSELLSEAKKLNDSQAPK

SEQ ID NO: 872 - protein, 58 aa, ARTIFICIAL SEQUENCE
  Engineered IL6 binding polypeptide
VDAKYAKEEYYAWTEIHKLPNLTIDQMAAFITKLFDDPSQSSELLSEAKKLNDSQAPK

SEQ ID NO: 873 - protein, 58 aa, ARTIFICIAL SEQUENCE
  Engineered IL6 binding polypeptide
VDAKYAKEEQAAWMEIHLLPNLTIDQMAAFITKLFDDPSQSSELLSEAKKLNDSQAPK

SEQ ID NO: 874 - protein, 58 aa, ARTIFICIAL SEQUENCE
  Engineered IL6 binding polypeptide
VDAKYAKEEYAAWTEIHLLPNLTIDQMAAFITKLFDDPSQSSELLSEAKKLNDSQAPK

SEQ ID NO: 875 - protein, 58 aa, ARTIFICIAL SEQUENCE
  Engineered IL6 binding polypeptide
VDAKYAKEEKEAWYEIHILPNLTISQMAAFITKLFDDPSQSSELLSEAKKLNDSQAPK

SEQ ID NO: 876 - protein, 58 aa, ARTIFICIAL SEQUENCE
  Engineered IL6 binding polypeptide
VDAKYAKEEREAWYEIHLLPNLTIVQMAAFISKLFDDPSQSSELLSEAKKLNDSQAPK

SEQ ID NO: 877 - protein, 58 aa, ARTIFICIAL SEQUENCE
  Engineered IL6 binding polypeptide
VDAKYAKEEYAAWVEIHKLPNLTVDQMAAFITKLFDDPSQSSELLSEAKKLNDSQAPK

SEQ ID NO: 878 - protein, 58 aa, ARTIFICIAL SEQUENCE
  Engineered IL6 binding polypeptide
VDAKYAKEEAYAWKEIHKLPNLTIEQMAAFITKLFDDPSQSSELLSEAKKLNDSQAPK

SEQ ID NO: 879 - protein, 58 aa, ARTIFICIAL SEQUENCE
  Engineered IL6 binding polypeptide
VDAKYAKEEKAAWTEIHLLPNLTIFQMAAFISKLFDDPSQSSELLSEAKKLNDSQAPK

SEQ ID NO: 880 - protein, 58 aa, ARTIFICIAL SEQUENCE
  Engineered IL6 binding polypeptide
VDAKYAKEEKEAWYEIHLLPNLTITQMAAFITKLFDDPSQSSELLSEAKKLNDSQAPK

SEQ ID NO: 881 - protein, 58 aa, ARTIFICIAL SEQUENCE
  Engineered IL6 binding polypeptide
VDAKYAKEERKAWYEIHLLPNLTVTQMAAFISKLFDDPSQSSELLSEAKKLNDSQAPK

SEQ ID NO: 882 - protein, 58 aa, ARTIFICIAL SEQUENCE
  Engineered IL6 binding polypeptide
VDAKYAKEEAMAWREIHLLPNLTVNQIAAFITKLFDDPSQSSELLSEAKKLNDSQAPK

SEQ ID NO: 883 - protein, 58 aa, ARTIFICIAL SEQUENCE
  Engineered IL6 binding polypeptide
VDAKYAKEEKHAWNEIHKLPNLTVEQMAAFITKLFDDPSQSSELLSEAKKLNDSQAPK

SEQ ID NO: 884 - protein, 58 aa, ARTIFICIAL SEQUENCE
  Engineered IL6 binding polypeptide
VDAKYAKEEYEAWTEIHKLPNLTIDQMAAFITKLFDDPSQSSELLSEAKKLNDSQAPK

SEQ ID NO: 885 - protein, 58 aa, ARTIFICIAL SEQUENCE
  Engineered IL6 binding polypeptide
VDAKYAKEEWNAWTEIHNLPNLTIDQMAAFITKLFDDPSQSSELLSEAKKLNDSQAPK

SEQ ID NO: 886 - protein, 58 aa, ARTIFICIAL SEQUENCE
  Engineered IL6 binding polypeptide
VDAKYAKEERAAWTEIHGLPNLTVEQMAAFITKLFDDPSQSSELLSEAKKLNDSQAPK

SEQ ID NO: 887 - protein, 58 aa, ARTIFICIAL SEQUENCE
  Engineered IL6 binding polypeptide
VDAKYAKEEADAWLEIHNLPNLTISQMAAFITKLFDDPSQSSELLSEAKKLNDSQAPK

SEQ ID NO: 888 - protein, 58 aa, ARTIFICIAL SEQUENCE
  Engineered IL6 binding polypeptide
VDAKYAKEEKAAWHEIHILPNLTVYQIAAFITKLFDDPSQSSELLSEAKKLNDSQAPK

SEQ ID NO: 889 - protein, 58 aa, ARTIFICIAL SEQUENCE
  Engineered IL6 binding polypeptide
VDAKYAKEEEKAWWEIHILPNLTIEQMAAFISKLFDDPSQSSELLSEAKKLNDSQAPK

SEQ ID NO: 890 - protein, 58 aa, ARTIFICIAL SEQUENCE
  Engineered IL6 binding polypeptide
VDAKYAKEEKSAWMEIHLLPNLTIEQMAAFITKLFDDPSQSSELLSEAKKLNDSQAPK

SEQ ID NO: 891 - protein, 58 aa, ARTIFICIAL SEQUENCE
  Engineered IL6 binding polypeptide
VDAKYAKEEYAAWMEIHRLPNLTIEQIAAFITKLFDDPSQSSELLSEAKKLNDSQAPK

SEQ ID NO: 892 - protein, 58 aa, ARTIFICIAL SEQUENCE
  Engineered IL6 binding polypeptide
VDAKYAKEEFRAWIEIHTLPNLTVDQMAAFITKLFDDPSQSSELLSEAKKLNDSQAPK

SEQ ID NO: 893 - protein, 58 aa, ARTIFICIAL SEQUENCE
  Engineered IL6 binding polypeptide
VDAKYAKEEKDAWNEIHKLPNLTIEQIAAFITKLFDDPSQSSELLSEAKKLNDSQAPK

SEQ ID NO: 894 - protein, 58 aa, ARTIFICIAL SEQUENCE
  Engineered IL6 binding polypeptide
VDAKYAKEEKHAWYEIHLLPNLTVEQMAAFITKLFDDPSQSSELLSEAKKLNDSQAPK

SEQ ID NO: 895 - protein, 58 aa, ARTIFICIAL SEQUENCE
  Engineered IL6 binding polypeptide
VDAKYAKEEYEAWLEIHLLPNLTVDQMAAFISKLFDDPSQSSELLSEAKKLNDSQAPK

SEQ ID NO: 896 - protein, 58 aa, ARTIFICIAL SEQUENCE
  Engineered IL6 binding polypeptide
VDAKYAKEEKNAWHEIHRLPNLTVNQMAAFITKLFDDPSQSSELLSEAKKLNDSQAPK

SEQ ID NO: 897 - protein, 58 aa, ARTIFICIAL SEQUENCE
  Engineered IL6 binding polypeptide
VDAKYAKEEKNAWTEIHNLPNLTISQMAAFITKLFDDPSQSSELLSEAKKLNDSQAPK

SEQ ID NO: 898 - protein, 58 aa, ARTIFICIAL SEQUENCE
  Engineered IL6 binding polypeptide
VDAKYAKEEAAAWYEIHALPNLTVEQMAAFITKLFDDPSQSSELLSEAKKLNDSQAPK

SEQ ID NO: 899 - protein, 58 aa, ARTIFICIAL SEQUENCE
  Engineered IL6 binding polypeptide
VDAKYAKEEWNAWMEIHLLPNLTVTQMAAFITKLFDDPSQSSELLSEAKKLNDSQAPK

SEQ ID NO: 900 - protein, 58 aa, ARTIFICIAL SEQUENCE
  Engineered IL6 binding polypeptide
VDAKYAKEEAKAWHEIHILPNLTVHQIAAFITKLFDDPSQSSELLSEAKKLNDSQAPK

SEQ ID NO: 901 - protein, 58 aa, ARTIFICIAL SEQUENCE
  Engineered IL6 binding polypeptide
VDAKYAKEERKAWHEIHILPNLTVHQIAAFITKLFDDPSQSSELLSEAKKLNDSQAPK

SEQ ID NO: 902 - protein, 58 aa, ARTIFICIAL SEQUENCE
  Engineered IL6 binding polypeptide
VDAKYAKEESKAWFEIHALPNLTVEQIAAFITKLFDDPSQSSELLSEAKKLNDSQAPK

SEQ ID NO: 903 - protein, 58 aa, ARTIFICIAL SEQUENCE
  Engineered IL6 binding polypeptide
VDAKYAKEEKRAWYEIHILPNLTISQIAAFITKLFDDPSQSSELLSEAKKLNDSQAPK

SEQ ID NO: 904 - protein, 58 aa, ARTIFICIAL SEQUENCE
  Engineered IL6 binding polypeptide
VDAKYAKEEKKAWTEIHVLPNLTISQIAAFISKLFDDPSQSSELLSEAKKLNDSQAPK

SEQ ID NO: 905 - protein, 58 aa, ARTIFICIAL SEQUENCE
  Engineered IL6 binding polypeptide
VDAKYAKEERDAWFEIHALPNLTIDQMAAFITKLFDDPSQSSELLSEAKKLNDSQAPK

SEQ ID NO: 906 - protein, 58 aa, ARTIFICIAL SEQUENCE
  Engineered IL6 binding polypeptide
VDAKYAKEEYEAWEEIHRLPNLTIDQMAAFISKLFDDPSQSSELLSEAKKLNDSQAPK

SEQ ID NO: 907 - protein, 58 aa, ARTIFICIAL SEQUENCE
  Engineered IL6 binding polypeptide
VDAKYAKEERNAWFEIHKLPNLTINQMAAFISKLFDDPSQSSELLSEAKKLNDSQAPK

SEQ ID NO: 908 - protein, 58 aa, ARTIFICIAL SEQUENCE
  Engineered IL6 binding polypeptide
VDAKYAKEEHHAWNEIHKLPNLTVDQIAAFISKLFDDPSQSSELLSEAKKLNDSQAPK

SEQ ID NO: 909 - protein, 58 aa, ARTIFICIAL SEQUENCE
  Engineered IL6 binding polypeptide
VDAKYAKEEHYAWKEIHLLPNLTIDQMAAFITKLFDDPSQSSELLSEAKKLNDSQAPK

SEQ ID NO: 910 - protein, 58 aa, ARTIFICIAL SEQUENCE
  Engineered IL6 binding polypeptide
VDAKYAKEESDAWYEIHLLPNLTIEQMAAFITKLFDDPSQSSELLSEAKKLNDSQAPK

SEQ ID NO: 911 - protein, 58 aa, ARTIFICIAL SEQUENCE
  Engineered IL6 binding polypeptide
VDAKYAKEEYEAWMEIHLLPNLTIGQMAAFITKLFDDPSQSSELLSEAKKLNDSQAPK

SEQ ID NO: 912 - protein, 58 aa, ARTIFICIAL SEQUENCE
  Engineered IL6 binding polypeptide
VDAKYAKEEKEAWYEIHLLPNLTVEQMAAFISKLFDDPSQSSELLSEAKKLNDSQAPK

SEQ ID NO: 913 - protein, 58 aa, ARTIFICIAL SEQUENCE
  Engineered IL6 binding polypeptide
VDAKYAKEERAAWKEIHILPNLTVEQIAAFITKLFDDPSQSSELLSEAKKLNDSQAPK

SEQ ID NO: 914 - protein, 58 aa, ARTIFICIAL SEQUENCE
  Engineered IL6 binding polypeptide
VDAKYAKEEKEAWYEIHILPNLTVHQMAAFITKLFDDPSQSSELLSEAKKLNDSQAPK

SEQ ID NO: 915 - protein, 58 aa, ARTIFICIAL SEQUENCE
  Engineered IL6 binding polypeptide
VDAKYAKEEYDAWIEIHALPNLTVDQMAAFISKLFDDPSQSSELLSEAKKLNDSQAPK

SEQ ID NO: 916 - protein, 58 aa, ARTIFICIAL SEQUENCE
  Engineered IL6 binding polypeptide
VDAKYAKEERKAWTEIHLLPNLTIDQMAAFITKLFDDPSQSSELLSEAKKLNDSQAPK

SEQ ID NO: 917 - protein, 58 aa, ARTIFICIAL SEQUENCE
  Engineered IL6 binding polypeptide
VDAKYAKEEYHAWVEIHNLPNLTIDQIAAFITKLFDDPSQSSELLSEAKKLNDSQAPK

SEQ ID NO: 918 - protein, 58 aa, ARTIFICIAL SEQUENCE
  Engineered IL6 binding polypeptide
VDAKYAKEEREAWTEIHKLPNLTIDQMAAFITKLFDDPSQSSELLSEAKKLNDSQAPK

SEQ ID NO: 919 - protein, 58 aa, ARTIFICIAL SEQUENCE
  Engineered IL6 binding polypeptide
VDAKYAKEEQWAWYEIHLLPNLTVNQMAAFITKLFDDPSQSSELLSEAKKLNDSQAPK

SEQ ID NO: 920 - protein, 58 aa, ARTIFICIAL SEQUENCE
  Engineered IL6 binding polypeptide
VDAKYAKEEKQAWMEIHKLPNLTVHQVAAFISKLFDDPSQSSELLSEAKKLNDSQAPK

SEQ ID NO: 921 - protein, 58 aa, ARTIFICIAL SEQUENCE
  Engineered IL6 binding polypeptide
VDAKYAKEESDAWTEIHKLPNLTIDQMAAFITKLFDDPSQSSELLSEAKKLNDSQAPK

SEQ ID NO: 922 - protein, 58 aa, ARTIFICIAL SEQUENCE
  Engineered IL6 binding polypeptide
VDAKYAKEEAQAWWEIHSLPNLTVDQIAAFITKLFDDPSQSSELLSEAKKLNDSQAPK

SEQ ID NO: 923 - protein, 58 aa, ARTIFICIAL SEQUENCE
  Engineered IL6 binding polypeptide
VDAKYAKEEKMAWYEIHNLPNLTVNQMAAFITKLFDDPSQSSELLSEAKKLNDSQAPK

SEQ ID NO: 924 - protein, 58 aa, ARTIFICIAL SEQUENCE
  Engineered IL6 binding polypeptide
VDAKYAKEEWMAWMEIHNLPNLTVNQMAAFITKLFDDPSQSSELLSEAKKLNDSQAPK

SEQ ID NO: 925 - protein, 58 aa, ARTIFICIAL SEQUENCE
  Engineered IL6 binding polypeptide
VDAKYAKEEARAWYEIHILPNLTVKQMAAFITKLFDDPSQSSELLSEAKKLNDSQAPK

SEQ ID NO: 926 - protein, 58 aa, ARTIFICIAL SEQUENCE
  Engineered IL6 binding polypeptide
VDAKYAKEEAKAWHEIHILPNLTVSQVAAFITKLFDDPSQSSELLSEAKKLNDSQAPK

SEQ ID NO: 927 - protein, 58 aa, ARTIFICIAL SEQUENCE
  Engineered IL6 binding polypeptide
VDAKYAKEERAAWHEIHILPNLTVDQMAAFISKLFDDPSQSSELLSEAKKLNDSQAPK

SEQ ID NO: 928 - protein, 58 aa, ARTIFICIAL SEQUENCE
  Engineered IL6 binding polypeptide
VDAKYAKEEWQAWTEIHLLPNLTLDQVAAFITKLFDDPSQSSELLSEAKKLNDSQAPK

SEQ ID NO: 929 - protein, 58 aa, ARTIFICIAL SEQUENCE
  Engineered IL6 binding polypeptide
VDAKYAKEEAFAWEEIHRLPNLTIEQMAAFISKLFDDPSQSSELLSEAKKLNDSQAPK

SEQ ID NO: 930 - protein, 58 aa, ARTIFICIAL SEQUENCE
  Engineered IL6 binding polypeptide
VDAKYAKEERKAWYEIHKLPNLTVDQMAAFITKLFDDPSQSSELLSEAKKLNDSQAPK

SEQ ID NO: 931 - protein, 58 aa, ARTIFICIAL SEQUENCE
  Engineered IL6 binding polypeptide
VDAKYAKEEKQAWYEIHLLPNLTVEQMAAFITKLFDDPSQSSELLSEAKKLNDSQAPK

SEQ ID NO: 932 - protein, 58 aa, ARTIFICIAL SEQUENCE
  Engineered IL6 binding polypeptide
VDAKYAKEEYDAWWEIHLLPNLTVDQMAAFITKLFDDPSQSSELLSEAKKLNDSQAPK

SEQ ID NO: 933 - protein, 58 aa, ARTIFICIAL SEQUENCE
  Engineered IL6 binding polypeptide
VDAKYAKEEHDAWNEIHLLPNLTIDQMAAFITKLFDDPSQSSELLSEAKKLNDSQAPK

SEQ ID NO: 934 - protein, 58 aa, ARTIFICIAL SEQUENCE
  Engineered IL6 binding polypeptide
VDAKYAKEEYTAWTEIHQLPNLTVQQMAAFITKLFDDPSQSSELLSEAKKLNDSQAPK

SEQ ID NO: 935 - protein, 58 aa, ARTIFICIAL SEQUENCE
  Engineered IL6 binding polypeptide
VDAKYAKEEARAWHEIHILPNLTVRQIAAFITKLFDDPSQSSELLSEAKKLNDSQAPK

SEQ ID NO: 936 - protein, 58 aa, ARTIFICIAL SEQUENCE
  Engineered IL6 binding polypeptide
VDAKYAKEERNAWFEIHQLPNLTVHQVAAFITKLFDDPSQSSELLSEAKKLNDSQAPK

SEQ ID NO: 937 - protein, 58 aa, ARTIFICIAL SEQUENCE
  Engineered IL6 binding polypeptide
VDAKYAKEEADAWYEIHLLPNLTVEQMAAFITKLFDDPSQSSELLSEAKKLNDSQAPK

SEQ ID NO: 938 - protein, 58 aa, ARTIFICIAL SEQUENCE
  Engineered IL6 binding polypeptide
VDAKYAKEEFEAWKEIHILPNLTVDQMAAFITKLFDDPSQSSELLSEAKKLNDSQAPK

SEQ ID NO: 939 - protein, 58 aa, ARTIFICIAL SEQUENCE
  Engineered IL6 binding polypeptide
VDAKYAKEEAYAWWEIHKLPNLTVHQMAAFITKLFDDPSQSSELLSEAKKLNDSQAPK

SEQ ID NO: 940 - protein, 58 aa, ARTIFICIAL SEQUENCE
  Engineered IL6 binding polypeptide
VDAKYAKEEKTAWHEIHNLPNLTIDQMAAFITKLFDDPSQSSELLSEAKKLNDSQAPK

SEQ ID NO: 941 - protein, 58 aa, ARTIFICIAL SEQUENCE
  Engineered IL6 binding polypeptide
VDAKYAKEEAKAWNEIHKLPNLTIDQIAAFISKLFDDPSQSSELLSEAKKLNDSQAPK

SEQ ID NO: 942 - protein, 58 aa, ARTIFICIAL SEQUENCE
  Engineered IL6 binding polypeptide
VDAKYAKEEKDAWIEIHNLPNLTVEQMAAFITKLFDDPSQSSELLSEAKKLNDSQAPK

SEQ ID NO: 943 - protein, 58 aa, ARTIFICIAL SEQUENCE
  Engineered IL6 binding polypeptide
VDAKYAKEEFFAWKEIHLLPNLTVEQIAAFITKLFDDPSQSSELLSEAKKLNDSQAPK

SEQ ID NO: 944 - protein, 58 aa, ARTIFICIAL SEQUENCE
  Engineered IL6 binding polypeptide
VDAKYAKEEQAAWLEIHLLPNLTVSQIAAFITKLFDDPSQSSELLSEAKKLNDSQAPK

SEQ ID NO: 945 - protein, 58 aa, ARTIFICIAL SEQUENCE
  Engineered IL6 binding polypeptide
VDAKYAKEEYFAWREIHVLPNLTVDQMAAFISKLFDDPSQSSELLSEAKKLNDSQAPK

SEQ ID NO: 946 - protein, 58 aa, ARTIFICIAL SEQUENCE
  Engineered IL6 binding polypeptide
VDAKYAKEEYYAWREIHLLPNLTITQMAAFITKLFDDPSQSSELLSEAKKLNDSQAPK

SEQ ID NO: 947 - protein, 58 aa, ARTIFICIAL SEQUENCE
  Engineered IL6 binding polypeptide
VDAKYAKEEKMAWTEIHLLPNLTISQMAAFITKLFDDPSQSSELLSEAKKLNDSQAPK

SEQ ID NO: 948 - protein, 58 aa, ARTIFICIAL SEQUENCE
  Engineered IL6 binding polypeptide
VDAKYAKEERNAWFEIHVLPNLTVKQMAAFITKLFDDPSQSSELLSEAKKLNDSQAPK

SEQ ID NO: 949 - protein, 58 aa, ARTIFICIAL SEQUENCE
  Engineered IL6 binding polypeptide
VDAKYAKEEKRAWTEIHILPNLTVEQMAAFISKLFDDPSQSSELLSEAKKLNDSQAPK

SEQ ID NO: 950 - protein, 58 aa, ARTIFICIAL SEQUENCE
  Engineered IL6 binding polypeptide
VDAKYAKEEAAAWKEIHLLPNLTIDQMAAFITKLFDDPSQSSELLSEAKKLNDSQAPK

SEQ ID NO: 951 - protein, 58 aa, ARTIFICIAL SEQUENCE
  Engineered IL6 binding polypeptide
VDAKYAKEEKEAWMEIHALPNLTVDQVAAFITKLFDDPSQSSELLSEAKKLNDSQAPK

SEQ ID NO: 952 - protein, 58 aa, ARTIFICIAL SEQUENCE
  Engineered IL6 binding polypeptide
VDAKYAKEEKEAWYEIHNLPNLTIIQMAAFISKLFDDPSQSSELLSEAKKLNDSQAPK

SEQ ID NO: 953 - protein, 58 aa, ARTIFICIAL SEQUENCE
  Engineered IL6 binding polypeptide
VDAKYAKEEYDAWFEIHILPNLTVHQIAAFITKLFDDPSQSSELLSEAKKLNDSQAPK

SEQ ID NO: 954 - protein, 58 aa, ARTIFICIAL SEQUENCE
  Engineered IL6 binding polypeptide
VDAKYAKEEYGAWNEIHKLPNLTIDQMAAFITKLFDDPSQSSELLSEAKKLNDSQAPK

SEQ ID NO: 955 - protein, 58 aa, ARTIFICIAL SEQUENCE
  Engineered IL6 binding polypeptide
VDAKYAKEEWQAWMEIHSLPNLTVDQMAAFITKLFDDPSQSSELLSEAKKLNDSQAPK

SEQ ID NO: 956 - protein, 58 aa, ARTIFICIAL SEQUENCE
  Engineered IL6 binding polypeptide
VDAKYAKEEWNAWFEIHKLPNLTVEQMAAFITKLFDDPSQSSELLSEAKKLNDSQAPK

SEQ ID NO: 957 - protein, 58 aa, ARTIFICIAL SEQUENCE
  Engineered IL6 binding polypeptide
VDAKYAKEEANAWKEIHLLPNLTVDQMAAFITKLFDDPSQSSELLSEAKKLNDSQAPK

SEQ ID NO: 958 - protein, 58 aa, ARTIFICIAL SEQUENCE
  Engineered IL6 binding polypeptide
VDAKYAKEEYEAWTEIHLLPNLTVHQMAAFITKLFDDPSQSSELLSEAKKLNDSQAPK

SEQ ID NO: 959 - protein, 58 aa, ARTIFICIAL SEQUENCE
  Engineered IL6 binding polypeptide
VDAKYAKEERIAWWEIHSLPNLTVNQVAAFISKLFDDPSQSSELLSEAKKLNDSQAPK

SEQ ID NO: 960 - protein, 58 aa, ARTIFICIAL SEQUENCE
  Engineered IL6 binding polypeptide
VDAKYAKEEYNAWVEIHTLPNLTVNQMAAFITKLFDDPSQSSELLSEAKKLNDSQAPK

SEQ ID NO: 961 - protein, 58 aa, ARTIFICIAL SEQUENCE
  Engineered IL6 binding polypeptide
VDAKYAKEEAFAWSEIHILPNLTIDQIAAFITKLFDDPSQSSELLSEAKKLNDSQAPK

SEQ ID NO: 962 - protein, 58 aa, ARTIFICIAL SEQUENCE
  Engineered IL6 binding polypeptide
VDAKYAKEEAHAWHEIHILPNLTIDQMAAFISKLFDDPSQSSELLSEAKKLNDSQAPK

SEQ ID NO: 963 - protein, 58 aa, ARTIFICIAL SEQUENCE
  Engineered IL6 binding polypeptide
VDAKYAKEEAAAWNEIHRLPNLTVDQIAAFISKLFDDPSQSSELLSEAKKLNDSQAPK

SEQ ID NO: 964 - protein, 58 aa, ARTIFICIAL SEQUENCE
  Engineered IL6 binding polypeptide
VDAKYAKEEKAAWTEIHLLPNLTVDQMAAFITKLFDDPSQSSELLSEAKKLNDSQAPK

SEQ ID NO: 965 - protein, 58 aa, ARTIFICIAL SEQUENCE
  Engineered IL6 binding polypeptide
VDAKYAKEEKGAWNEIHLLPNLTIQQMAAFISKLFDDPSQSSELLSEAKKLNDSQAPK

SEQ ID NO: 966 - protein, 58 aa, ARTIFICIAL SEQUENCE
  Engineered IL6 binding polypeptide
VDAKYAKEEYAAWMEIHSLPNLTVDQMAAFITKLFDDPSQSSELLSEAKKLNDSQAPK

SEQ ID NO: 967 - protein, 58 aa, ARTIFICIAL SEQUENCE
  Engineered IL6 binding polypeptide
VDAKYAKEEAAAWKEIHILPNLTIEQIAAFISKLFDDPSQSSELLSEAKKLNDSQAPK

SEQ ID NO: 968 - protein, 58 aa, ARTIFICIAL SEQUENCE
  Engineered IL6 binding polypeptide
VDAKYAKEEKFAWNEIHILPNLTVHQIAAFITKLFDDPSQSSELLSEAKKLNDSQAPK

SEQ ID NO: 969 - protein, 58 aa, ARTIFICIAL SEQUENCE
  Engineered IL6 binding polypeptide
VDAKYAKEEYNAWLEIHKLPNLTINQMAAFITKLFDDPSQSSELLSEAKKLNDSQAPK

SEQ ID NO: 970 - protein, 58 aa, ARTIFICIAL SEQUENCE
  Engineered IL6 binding polypeptide
VDAKYAKEEHTAWLEIHSLPNLTIEQVAAFITKLFDDPSQSSELLSEAKKLNDSQAPK

SEQ ID NO: 971 - protein, 58 aa, ARTIFICIAL SEQUENCE
  Engineered IL6 binding polypeptide
VDAKYAKEEKDAWMEIHILPNLTVDQMAAFITKLFDDPSQSSELLSEAKKLNDSQAPK

SEQ ID NO: 972 - protein, 58 aa, ARTIFICIAL SEQUENCE
  Engineered IL6 binding polypeptide
VDAKYAKEEATAWIEIHSLPNLTVDQMAAFITKLFDDPSQSSELLSEAKKLNDSQAPK

SEQ ID NO: 973 - protein, 58 aa, ARTIFICIAL SEQUENCE
  Engineered IL6 binding polypeptide
VDAKYAKEEKEAWWEIHLLPNLTVDQMAAFITKLFDDPSQSSELLSEAKKLNDSQAPK

SEQ ID NO: 974 - protein, 58 aa, ARTIFICIAL SEQUENCE
  Engineered IL6 binding polypeptide
VDAKYAKEEQHAWIEIHKLPNLTVDQMAAFITKLFDDPSQSSELLSEAKKLNDSQAPK

SEQ ID NO: 975 - protein, 58 aa, ARTIFICIAL SEQUENCE
  Engineered IL6 binding polypeptide
VDAKYAKEEKHAWHEIHILPNLTIEQMAAFISKLFDDPSQSSELLSEAKKLNDSQAPK

SEQ ID NO: 976 - protein, 58 aa, ARTIFICIAL SEQUENCE
  Engineered IL6 binding polypeptide
VDAKYAKEEAKAWHEIHILPNLTIEQMAAFITKLFDDPSQSSELLSEAKKLNDSQAPK

SEQ ID NO: 977 - protein, 58 aa, ARTIFICIAL SEQUENCE
  Engineered IL6 binding polypeptide
VDAKYAKEEKKAWTEIHILPNLTVEQIAAFITKLFDDPSQSSELLSEAKKLNDSQAPK

SEQ ID NO: 978 - protein, 58 aa, ARTIFICIAL SEQUENCE
  Engineered IL6 binding polypeptide
VDAKYAKEERAAWYEIHVLPNLTVSQMAAFISKLFDDPSQSSELLSEAKKLNDSQAPK

SEQ ID NO: 979 - protein, 58 aa, ARTIFICIAL SEQUENCE
  Engineered IL6 binding polypeptide
VDAKYAKEERFAWAEIHKLPNLTIDQMAAFITKLFDDPSQSSELLSEAKKLNDSQAPK

SEQ ID NO: 980 - protein, 58 aa, ARTIFICIAL SEQUENCE
  Engineered IL6 binding polypeptide
VDAKYAKEEYAAWFEIHLLPNLTIDQMAAFISKLFDDPSQSSELLSEAKKLNDSQAPK

SEQ ID NO: 981 - protein, 58 aa, ARTIFICIAL SEQUENCE
  Engineered IL6 binding polypeptide
VDAKYAKEEYDAWFEIHLLPNLTIDQMAAFISKLFDDPSQSSELLSEAKKLNDSQAPK

SEQ ID NO: 982 - protein, 58 aa, ARTIFICIAL SEQUENCE
  Engineered IL6 binding polypeptide
VDAKYAKEEWEAWMEIHALPNLTVDQMAAFITKLFDDPSQSSELLSEAKKLNDSQAPK

SEQ ID NO: 983 - protein, 58 aa, ARTIFICIAL SEQUENCE
  Engineered IL6 binding polypeptide
VDAKYAKEEKDAWWEIHALPNLTIEQMAAFITKLFDDPSQSSELLSEAKKLNDSQAPK

SEQ ID NO: 984 - protein, 58 aa, ARTIFICIAL SEQUENCE
  Engineered IL6 binding polypeptide
VDAKYAKEERDAWFEIHSLPNLTVDQMAAFITKLFDDPSQSSELLSEAKKLNDSQAPK

SEQ ID NO: 985 - protein, 58 aa, ARTIFICIAL SEQUENCE
  Engineered IL6 binding polypeptide
VDAKYAKEEFYAWLEIHKLPNLTVSQMAAFITKLFDDPSQSSELLSEAKKLNDSQAPK

SEQ ID NO: 986 - protein, 58 aa, ARTIFICIAL SEQUENCE
  Engineered IL6 binding polypeptide
VDAKYAKEEYEAWYEIHILPNLTVDQMAAFITKLFDDPSQSSELLSEAKKLNDSQAPK

SEQ ID NO: 987 - protein, 58 aa, ARTIFICIAL SEQUENCE
  Engineered IL6 binding polypeptide
VDAKYAKEERDAWFEIHLLPNLTVNQMAAFITKLFDDPSQSSELLSEAKKLNDSQAPK

SEQ ID NO: 988 - protein, 58 aa, ARTIFICIAL SEQUENCE
  Engineered IL6 binding polypeptide
VDAKYAKEEYRAWTEIHILPNLTITQIAAFITKLFDDPSQSSELLSEAKKLNDSQAPK

SEQ ID NO: 989 - protein, 58 aa, ARTIFICIAL SEQUENCE
  Engineered IL6 binding polypeptide
VDAKYAKEEYEAWTEIHLLPNLTIEQMAAFISKLFDDPSQSSELLSEAKKLNDSQAPK

SEQ ID NO: 990 - protein, 58 aa, ARTIFICIAL SEQUENCE
  Engineered IL6 binding polypeptide
VDAKYAKEEYDAWLEIHILPNLTVEQIAAFITKLFDDPSQSSELLSEAKKLNDSQAPK

SEQ ID NO: 991 - protein, 58 aa, ARTIFICIAL SEQUENCE
  Engineered IL6 binding polypeptide
VDAKYAKEERKAWYEIHSLPNLTVDQMAAFITKLFDDPSQSSELLSEAKKLNDSQAPK

SEQ ID NO: 992 - protein, 58 aa, ARTIFICIAL SEQUENCE
  Engineered IL6 binding polypeptide
VDAKYAKEEHTAWTEIHRLPNLTIEQMAAFITKLFDDPSQSSELLSEAKKLNDSQAPK

SEQ ID NO: 993 - protein, 58 aa, ARTIFICIAL SEQUENCE
  Engineered IL6 binding polypeptide
VDAKYAKEEYQAWTEIHLLPNLTVEQMAAFITKLFDDPSQSSELLSEAKKLNDSQAPK

SEQ ID NO: 994 - protein, 58 aa, ARTIFICIAL SEQUENCE
  Engineered IL6 binding polypeptide
VDAKYAKEERMAWFEIHSLPNLTVDQMAAFITKLFDDPSQSSELLSEAKKLNDSQAPK

SEQ ID NO: 995 - protein, 58 aa, ARTIFICIAL SEQUENCE
  Engineered IL6 binding polypeptide
VDAKYAKEEYDAWYEIHILPNLTVEQIAAFITKLFDDPSQSSELLSEAKKLNDSQAPK

SEQ ID NO: 996 - protein, 58 aa, ARTIFICIAL SEQUENCE
  Engineered IL6 binding polypeptide
VDAKYAKEEKEAWMEIHLLPNLTIDQMAAFITKLFDDPSQSSELLSEAKKLNDSQAPK

SEQ ID NO: 997 - protein, 58 aa, ARTIFICIAL SEQUENCE
  Engineered IL6 binding polypeptide
VDAKYAKEEYDAWFEIHSLPNLTVNQMAAFITKLFDDPSQSSELLSEAKKLNDSQAPK

SEQ ID NO: 998 - protein, 58 aa, ARTIFICIAL SEQUENCE
  Engineered IL6 binding polypeptide
VDAKYAKEEAFAWREIHILPNLTIDQMAAFITKLFDDPSQSSELLSEAKKLNDSQAPK

SEQ ID NO: 999 - protein, 58 aa, ARTIFICIAL SEQUENCE
  Engineered IL6 binding polypeptide
VDAKYAKEERKAWMEIHLLPNLTIEQMAAFITKLFDDPSQSSELLSEAKKLNDSQAPK

SEQ ID NO: 1000 - protein, 58 aa, ARTIFICIAL SEQUENCE
  Engineered IL6 binding polypeptide
VDAKYAKEEKAAWIEIHNLPNLTVDQMAAFITKLFDDPSQSSELLSEAKKLNDSQAPK

SEQ ID NO: 1001 - protein, 58 aa, ARTIFICIAL SEQUENCE
  Engineered IL6 binding polypeptide
VDAKYAKEERNAWIEIHNLPNLTIEQMAAFITKLFDDPSQSSELLSEAKKLNDSQAPK

SEQ ID NO: 1002 - protein, 58 aa, ARTIFICIAL SEQUENCE
  Engineered IL6 binding polypeptide
VDAKYAKEEKNAWTEIHLLPNLTIEQMAAFITKLFDDPSQSSELLSEAKKLNDSQAPK

SEQ ID NO: 1003 - protein, 58 aa, ARTIFICIAL SEQUENCE
  Engineered IL6 binding polypeptide
VDAKYAKEEAEAWWEIHILPNLTIDQMAAFITKLFDDPSQSSELLSEAKKLNDSQAPK

SEQ ID NO: 1004 - protein, 58 aa, ARTIFICIAL SEQUENCE
  Engineered IL6 binding polypeptide
VDAKYAKEEKLAWWEIHKLPNLTVDQMAAFITKLFDDPSQSSELLSEAKKLNDSQAPK

SEQ ID NO: 1005 - protein, 58 aa, ARTIFICIAL SEQUENCE
  Engineered IL6 binding polypeptide
VDAKYAKEEYEAWYEIHILPNLTIHQMAAFITKLFDDPSQSSELLSEAKKLNDSQAPK

SEQ ID NO: 1006 - protein, 58 aa, ARTIFICIAL SEQUENCE
  Engineered IL6 binding polypeptide
VDAKYAKEEARAWKEIHLLPNLTVGQIAAFITKLFDDPSQSSELLSEAKKLNDSQAPK

SEQ ID NO: 1007 - protein, 58 aa, ARTIFICIAL SEQUENCE
  Engineered IL6 binding polypeptide
VDAKYAKEEKQAWMEIHLLPNLTVDQMAAFITKLFDDPSQSSELLSEAKKLNDSQAPK

SEQ ID NO: 1008 - protein, 58 aa, ARTIFICIAL SEQUENCE
  Engineered IL6 binding polypeptide
VDAKYAKEEAAAWHEIHILPNLTVHQIAAFITKLFDDPSQSSELLSEAKKLNDSQAPK

SEQ ID NO: 1009 - protein, 58 aa, ARTIFICIAL SEQUENCE
  Engineered IL6 binding polypeptide
VDAKYAKEEKEAWFEIHKLPNLTVSQMAAFITKLFDDPSQSSELLSEAKKLNDSQAPK

SEQ ID NO: 1010 - protein, 58 aa, ARTIFICIAL SEQUENCE
  Engineered IL6 binding polypeptide
VDAKYAKEEKEAWFEIHTLPNLTVDQMAAFISKLFDDPSQSSELLSEAKKLNDSQAPK

SEQ ID NO: 1011 - protein, 58 aa, ARTIFICIAL SEQUENCE
  Engineered IL6 binding polypeptide
VDAKYAKEEYLAWVEIHNLPNLTIDQMAAFITKLFDDPSQSSELLSEAKKLNDSQAPK

SEQ ID NO: 1012 - protein, 58 aa, ARTIFICIAL SEQUENCE
  Engineered IL6 binding polypeptide
VDAKYAKEERDAWYEIHNLPNLTVGQMAAFITKLFDDPSQSSELLSEAKKLNDSQAPK

SEQ ID NO: 1013 - protein, 58 aa, ARTIFICIAL SEQUENCE
  Engineered IL6 binding polypeptide
VDAKYAKEESAAWFEIHLLPNLTINQMAAFITKLFDDPSQSSELLSEAKKLNDSQAPK

SEQ ID NO: 1014 - protein, 58 aa, ARTIFICIAL SEQUENCE
  Engineered IL6 binding polypeptide
VDAKYAKEEQYAWTEIHILPNLTVNQIAAFITKLFDDPSQSSELLSEAKKLNDSQAPK

SEQ ID NO: 1015 - protein, 58 aa, ARTIFICIAL SEQUENCE
  Engineered IL6 binding polypeptide
VDAKYAKEEKRAWMEIHLLPNLTVSQMAAFITKLFDDPSQSSELLSEAKKLNDSQAPK

SEQ ID NO: 1016 - protein, 58 aa, ARTIFICIAL SEQUENCE
  Engineered IL6 binding polypeptide
VDAKYAKEEKKAWFEIHLLPNLTIHQVAAFISKLFDDPSQSSELLSEAKKLNDSQAPK

SEQ ID NO: 1017 - protein, 58 aa, ARTIFICIAL SEQUENCE
  Engineered IL6 binding polypeptide
VDAKYAKEEKEAWYEIHSLPNLTVDQVAAFITKLFDDPSQSSELLSEAKKLNDSQAPK

SEQ ID NO: 1018 - protein, 58 aa, ARTIFICIAL SEQUENCE
  Engineered IL6 binding polypeptide
VDAKYAKEEWLAWNEIHLLPNLTISQIAAFISKLFDDPSQSSELLSEAKKLNDSQAPK

SEQ ID NO: 1019 - protein, 58 aa, ARTIFICIAL SEQUENCE
  Engineered IL6 binding polypeptide
VDAKYAKEEYNAWLEIHILPNLTVHQIAAFISKLFDDPSQSSELLSEAKKLNDSQAPK

SEQ ID NO: 1020 - protein, 58 aa, ARTIFICIAL SEQUENCE
  Engineered IL6 binding polypeptide
VDAKYAKEEHTAWMEIHRLPNLTIDQIAAFISKLFDDPSQSSELLSEAKKLNDSQAPK

SEQ ID NO: 1021 - protein, 58 aa, ARTIFICIAL SEQUENCE
  Engineered IL6 binding polypeptide
VDAKYAKEEKFAWTEIHLLPNLTVHQMAAFITKLFDDPSQSSELLSEAKKLNDSQAPK

SEQ ID NO: 1022 - protein, 58 aa, ARTIFICIAL SEQUENCE
  Engineered IL6 binding polypeptide
VDAKYAKEEKYAWTEIHILPNLTVNQMAAFITKLFDDPSQSSELLSEAKKLNDSQAPK

SEQ ID NO: 1023 - protein, 58 aa, ARTIFICIAL SEQUENCE
  Engineered IL6 binding polypeptide
VDAKYAKEEKFAWHEIHKLPNLTVDQIAAFITKLFDDPSQSSELLSEAKKLNDSQAPK

SEQ ID NO: 1024 - protein, 58 aa, ARTIFICIAL SEQUENCE
  Engineered IL6 binding polypeptide
VDAKYAKEERKAWYEIHGLPNLTVEQMAAFITKLFDDPSQSSELLSEAKKLNDSQAPK

SEQ ID NO: 1025 - protein, 58 aa, ARTIFICIAL SEQUENCE
  Engineered IL6 binding polypeptide
VDAKYAKEEYQAWLEIHLLPNLTVDQIAAFITKLFDDPSQSSELLSEAKKLNDSQAPK

SEQ ID NO: 1026 - protein, 58 aa, ARTIFICIAL SEQUENCE
  Engineered IL6 binding polypeptide
VDAKYAKEEKHAWMEIHLLPNLTVEQMAAFITKLFDDPSQSSELLSEAKKLNDSQAPK

SEQ ID NO: 1027 - protein, 58 aa, ARTIFICIAL SEQUENCE
  Engineered IL6 binding polypeptide
VDAKYAKEEKQAWREIHLLPNLTVDQIAAFISKLFDDPSQSSELLSEAKKLNDSQAPK

SEQ ID NO: 1028 - protein, 58 aa, ARTIFICIAL SEQUENCE
  Engineered IL6 binding polypeptide
VDAKYAKEEAMAWTEIHLLPNLTVSQMAAFITKLFDDPSQSSELLSEAKKLNDSQAPK

SEQ ID NO: 1029 - protein, 58 aa, ARTIFICIAL SEQUENCE
  Engineered IL6 binding polypeptide
VDAKYAKEEKHAWREIHLLPNLTLNQMAAFITKLFDDPSQSSELLSEAKKLNDSQAPK

SEQ ID NO: 1030 - protein, 58 aa, ARTIFICIAL SEQUENCE
  Engineered IL6 binding polypeptide
VDAKYAKEERYAWNEIHALPNLTVEQVAAFITKLFDDPSQSSELLSEAKKLNDSQAPK

SEQ ID NO: 1031 - protein, 58 aa, ARTIFICIAL SEQUENCE
  Engineered IL6 binding polypeptide
VDAKYAKEEREAWWEIHKLPNLTVDQMAAFISKLFDDPSQSSELLSEAKKLNDSQAPK

SEQ ID NO: 1032 - protein, 58 aa, ARTIFICIAL SEQUENCE
  Engineered IL6 binding polypeptide
VDAKYAKEEHRAWTEIHLLPNLTVDQMAAFISKLFDDPSQSSELLSEAKKLNDSQAPK

SEQ ID NO: 1033 - protein, 58 aa, ARTIFICIAL SEQUENCE
  Engineered IL6 binding polypeptide
VDAKYAKEEAYAWAEIHKLPNLTVVQMAAFISKLFDDPSQSSELLSEAKKLNDSQAPK

SEQ ID NO: 1034 - protein, 58 aa, ARTIFICIAL SEQUENCE
  Engineered IL6 binding polypeptide
VDAKYAKEEYFAWTEIHKLPNLTIDQIAAFITKLFDDPSQSSELLSEAKKLNDSQAPK

SEQ ID NO: 1035 - protein, 58 aa, ARTIFICIAL SEQUENCE
  Engineered IL6 binding polypeptide
VDAKYAKEEAHAWQEIHKLPNLTINQIAAFISKLFDDPSQSSELLSEAKKLNDSQAPK

SEQ ID NO: 1036 - protein, 58 aa, ARTIFICIAL SEQUENCE
  Engineered IL6 binding polypeptide
VDAKYAKEEKHAWTEIHKLPNLTIDQMAAFITKLFDDPSQSSELLSEAKKLNDSQAPK

SEQ ID NO: 1037 - protein, 58 aa, ARTIFICIAL SEQUENCE
  Engineered IL6 binding polypeptide
VDAKYAKEEYRAWYEIHILPNLTVKQMAAFITKLFDDPSQSSELLSEAKKLNDSQAPK

SEQ ID NO: 1038 - protein, 58 aa, ARTIFICIAL SEQUENCE
  Engineered IL6 binding polypeptide
VDAKYAKEEANAWIEIHKLPNLTVDQMAAFITKLFDDPSQSSELLSEAKKLNDSQAPK

SEQ ID NO: 1039 - protein, 58 aa, ARTIFICIAL SEQUENCE
  Engineered IL6 binding polypeptide
VDAKYAKEEKDAWTEIHKLPNLTIDQMAAFITKLFDDPSQSSELLSEAKKLNDSQAPK

SEQ ID NO: 1040 - protein, 58 aa, ARTIFICIAL SEQUENCE
  Engineered IL6 binding polypeptide
VDAKYAKEEREAWYEIHNLPNLTIIQMAAFISKLFDDPSQSSELLSEAKKLNDSQAPK

SEQ ID NO: 1041 - protein, 58 aa, ARTIFICIAL SEQUENCE
  Engineered IL6 binding polypeptide
VDAKYAKEEYYAWNEIHLLPNLTIEQMAAFITKLFDDPSQSSELLSEAKKLNDSQAPK

SEQ ID NO: 1042 - protein, 58 aa, ARTIFICIAL SEQUENCE
  Engineered IL6 binding polypeptide
VDAKYAKEEKTAWREIHLLPNLTIDQIAAFITKLFDDPSQSSELLSEAKKLNDSQAPK

SEQ ID NO: 1043 - protein, 58 aa, ARTIFICIAL SEQUENCE
  Engineered IL6 binding polypeptide
VDAKYAKEEAHAWREIHILPNLTLDQMAAFITKLFDDPSQSSELLSEAKKLNDSQAPK

SEQ ID NO: 1044 - protein, 58 aa, ARTIFICIAL SEQUENCE
  Engineered IL6 binding polypeptide
VDAKYAKEEAAAWLEIHQLPNLTVDQMAAFITKLFDDPSQSSELLSEAKKLNDSQAPK

SEQ ID NO: 1045 - protein, 58 aa, ARTIFICIAL SEQUENCE
  Engineered IL6 binding polypeptide
VDAKYAKEEAEAWLEIHILPNLTVEQMAAFITKLFDDPSQSSELLSEAKKLNDSQAPK

SEQ ID NO: 1046 - protein, 58 aa, ARTIFICIAL SEQUENCE
  Engineered IL6 binding polypeptide
VDAKYAKEEANAWFEIHILPNLTVQQMAAFITKLFDDPSQSSELLSEAKKLNDSQAPK

SEQ ID NO: 1047 - protein, 58 aa, ARTIFICIAL SEQUENCE
  Engineered IL6 binding polypeptide
VDAKYAKEERYAWMEIHLLPNLTINQMAAFITKLFDDPSQSSELLSEAKKLNDSQAPK

SEQ ID NO: 1048 - protein, 58 aa, ARTIFICIAL SEQUENCE
  Engineered IL6 binding polypeptide
VDAKYAKEERFAWNEIHKLPNLTIDQMAAFITKLFDDPSQSSELLSEAKKLNDSQAPK

SEQ ID NO: 1049 - protein, 58 aa, ARTIFICIAL SEQUENCE
  Engineered IL6 binding polypeptide
VDAKYAKEEAKAWFEIHLLPNLTIQQIAAFITKLFDDPSQSSELLSEAKKLNDSQAPK

SEQ ID NO: 1050 - protein, 58 aa, ARTIFICIAL SEQUENCE
  Engineered IL6 binding polypeptide
VDAKYAKEEREAWTEIHILPNLTIDQMAAFITKLFDDPSQSSELLSEAKKLNDSQAPK

SEQ ID NO: 1051 - protein, 58 aa, ARTIFICIAL SEQUENCE
  Engineered IL6 binding polypeptide
VDAKYAKEEFEAWNEIHKLPNLTIEQMAAFISKLFDDPSQSSELLSEAKKLNDSQAPK

SEQ ID NO: 1052 - protein, 58 aa, ARTIFICIAL SEQUENCE
  Engineered IL6 binding polypeptide
VDAKYAKEEKEAWYEIHILPNLTVHQIAAFISKLFDDPSQSSELLSEAKKLNDSQAPK

SEQ ID NO: 1053 - protein, 58 aa, ARTIFICIAL SEQUENCE
  Engineered IL6 binding polypeptide
VDAKYAKEEYQAWVEIHNLPNLTVDQMAAFITKLFDDPSQSSELLSEAKKLNDSQAPK

SEQ ID NO: 1054 - protein, 58 aa, ARTIFICIAL SEQUENCE
  Engineered IL6 binding polypeptide
VDAKYAKEEKKAWREIHLLPNLTINQIAAFITKLFDDPSQSSELLSEAKKLNDSQAPK

SEQ ID NO: 1055 - protein, 58 aa, ARTIFICIAL SEQUENCE
  Engineered IL6 binding polypeptide
VDAKYAKEEQDAWIEIHLLPNLTIDQMAAFITKLFDDPSQSSELLSEAKKLNDSQAPK

SEQ ID NO: 1056 - protein, 58 aa, ARTIFICIAL SEQUENCE
  Engineered IL6 binding polypeptide
VDAKYAKEEHDAWWEIHALPNLTINQMAAFISKLFDDPSQSSELLSEAKKLNDSQAPK

SEQ ID NO: 1057 - protein, 58 aa, ARTIFICIAL SEQUENCE
  Engineered IL6 binding polypeptide
VDAKYAKEEYDAWYEIHLLPNLTIQQMAAFISKLFDDPSQSSELLSEAKKLNDSQAPK

SEQ ID NO: 1058 - protein, 58 aa, ARTIFICIAL SEQUENCE
  Engineered IL6 binding polypeptide
VDAKYAKEEYQAWVEIHILPNLTIQQIAAFITKLFDDPSQSSELLSEAKKLNDSQAPK

SEQ ID NO: 1059 - protein, 58 aa, ARTIFICIAL SEQUENCE
  Engineered IL6 binding polypeptide
VDAKYAKEESKAWNEIHKLPNLTITQMAAFITKLFDDPSQSSELLSEAKKLNDSQAPK

SEQ ID NO: 1060 - protein, 58 aa, ARTIFICIAL SEQUENCE
  Engineered IL6 binding polypeptide
VDAKYAKEEYQAWYEIHLLPNLTVEQMAAFITKLFDDPSQSSELLSEAKKLNDSQAPK

SEQ ID NO: 1061 - protein, 58 aa, ARTIFICIAL SEQUENCE
  Engineered IL6 binding polypeptide
VDAKYAKEEKRAWMEIHLLPNLTVGQMAAFITKLFDDPSQSSELLSEAKKLNDSQAPK

SEQ ID NO: 1062 - protein, 58 aa, ARTIFICIAL SEQUENCE
  Engineered IL6 binding polypeptide
VDAKYAKEERVAWLEIHILPNLTIGQIAAFITKLFDDPSQSSELLSEAKKLNDSQAPK

SEQ ID NO: 1063 - protein, 58 aa, ARTIFICIAL SEQUENCE
  Engineered IL6 binding polypeptide
VDAKYAKEEQAAWYEIHLLPNLTIEQMAAFITKLFDDPSQSSELLSEAKKLNDSQAPK

SEQ ID NO: 1064 - protein, 58 aa, ARTIFICIAL SEQUENCE
  Engineered IL6 binding polypeptide
VDAKYAKEEKDAWYEIHILPNLTVSQIAAFITKLFDDPSQSSELLSEAKKLNDSQAPK

SEQ ID NO: 1065 - protein, 58 aa, ARTIFICIAL SEQUENCE
  Engineered IL6 binding polypeptide
VDAKYAKEEKKAWYEIHLLPNLTISQMAAFITKLFDDPSQSSELLSEAKKLNDSQAPK

SEQ ID NO: 1066 - protein, 58 aa, ARTIFICIAL SEQUENCE
  Engineered IL6 binding polypeptide
VDAKYAKEEKKAWYEIHLLPNLTINQMAAFITKLFDDPSQSSELLSEAKKLNDSQAPK

SEQ ID NO: 1067 - protein, 58 aa, ARTIFICIAL SEQUENCE
  Engineered IL6 binding polypeptide
VDAKYAKEEHKAWTEIHLLPNLTVDQIAAFITKLFDDPSQSSELLSEAKKLNDSQAPK

SEQ ID NO: 1068 - protein, 58 aa, ARTIFICIAL SEQUENCE
  Engineered IL6 binding polypeptide
VDAKYAKEEAAAWHEIHLLPNLTIDQMAAFITKLFDDPSQSSELLSEAKKLNDSQAPK

SEQ ID NO: 1069 - protein, 58 aa, ARTIFICIAL SEQUENCE
  Engineered IL6 binding polypeptide
VDAKYAKEERSAWTEIHLLPNLTITQIAAFITKLFDDPSQSSELLSEAKKLNDSQAPK

SEQ ID NO: 1070 - protein, 58 aa, ARTIFICIAL SEQUENCE
  Engineered IL6 binding polypeptide
VDAKYAKEERLAWQEIHRLPNLTVDQMAAFITKLFDDPSQSSELLSEAKKLNDSQAPK

SEQ ID NO: 1071 - protein, 58 aa, ARTIFICIAL SEQUENCE
  Engineered IL6 binding polypeptide
VDAKYAKEEKDAWTEIHLLPNLTVEQMAAFISKLFDDPSQSSELLSEAKKLNDSQAPK

SEQ ID NO: 1072 - protein, 58 aa, ARTIFICIAL SEQUENCE
  Engineered IL6 binding polypeptide
VDAKYAKEEKAAWMEIHNLPNLTIDQMAAFITKLFDDPSQSSELLSEAKKLNDSQAPK

SEQ ID NO: 1073 - protein, 58 aa, ARTIFICIAL SEQUENCE
  Engineered IL6 binding polypeptide
VDAKYAKEEYEAWVEIHNLPNLTIDQMAAFITKLFDDPSQSSELLSEAKKLNDSQAPK

SEQ ID NO: 1074 - protein, 58 aa, ARTIFICIAL SEQUENCE
  Engineered IL6 binding polypeptide
VDAKYAKEEAKAWTEIHLLPNLTVNQIAAFITKLFDDPSQSSELLSEAKKLNDSQAPK

SEQ ID NO: 1075 - protein, 58 aa, ARTIFICIAL SEQUENCE
  Engineered IL6 binding polypeptide
VDAKYAKEEKKAWYEIHILPNLTIHQIAAFITKLFDDPSQSSELLSEAKKLNDSQAPK

SEQ ID NO: 1076 - protein, 58 aa, ARTIFICIAL SEQUENCE
  Engineered IL6 binding polypeptide
VDAKYAKEEKKAWFEIHLLPNLTVDQMAAFISKLFDDPSQSSELLSEAKKLNDSQAPK

SEQ ID NO: 1077 - protein, 58 aa, ARTIFICIAL SEQUENCE
  Engineered IL6 binding polypeptide
VDAKYAKEERKAWFEIHSLPNLTIDQMAAFITKLFDDPSQSSELLSEAKKLNDSQAPK

SEQ ID NO: 1078 - protein, 58 aa, ARTIFICIAL SEQUENCE
  Engineered IL6 binding polypeptide
VDAKYAKEERNAWYEIHLLPNLTVDQMAAFITKLFDDPSQSSELLSEAKKLNDSQAPK

SEQ ID NO: 1079 - protein, 58 aa, ARTIFICIAL SEQUENCE
  Engineered IL6 binding polypeptide
VDAKYAKEEASAWKEIHLLPNLTIDQVAAFITKLFDDPSQSSELLSEAKKLNDSQAPK

SEQ ID NO: 1080 - protein, 58 aa, ARTIFICIAL SEQUENCE
  Engineered IL6 binding polypeptide
VDAKYAKEEAAAWKEIHLLPNLTIDQMAAFISKLFDDPSQSSELLSEAKKLNDSQAPK

SEQ ID NO: 1081 - protein, 58 aa, ARTIFICIAL SEQUENCE
  Engineered IL6 binding polypeptide
VDAKYAKEEAWAWHEIHILPNLTIEQMAAFITKLFDDPSQSSELLSEAKKLNDSQAPK

SEQ ID NO: 1082 - protein, 58 aa, ARTIFICIAL SEQUENCE
  Engineered IL6 binding polypeptide
VDAKYAKEEKYAWLEIHKLPNLTVDQVAAFITKLFDDPSQSSELLSEAKKLNDSQAPK

SEQ ID NO: 1083 - protein, 58 aa, ARTIFICIAL SEQUENCE
  Engineered IL6 binding polypeptide
VDAKYAKEERSAWMEIHLLPNLTINQMAAFISKLFDDPSQSSELLSEAKKLNDSQAPK

SEQ ID NO: 1084 - protein, 58 aa, ARTIFICIAL SEQUENCE
  Engineered IL6 binding polypeptide
VDAKYAKEERMAWNEIHGLPNLTVDQMAAFITKLFDDPSQSSELLSEAKKLNDSQAPK

SEQ ID NO: 1085 - protein, 58 aa, ARTIFICIAL SEQUENCE
  Engineered IL6 binding polypeptide
VDAKYAKEEAKAWYEIHILPNLTIIQMAAFITKLFDDPSQSSELLSEAKKLNDSQAPK

SEQ ID NO: 1086 - protein, 58 aa, ARTIFICIAL SEQUENCE
  Engineered IL6 binding polypeptide
VDAKYAKEEKWAWTEIHKLPNLTISQMAAFITKLFDDPSQSSELLSEAKKLNDSQAPK

SEQ ID NO: 1087 - protein, 58 aa, ARTIFICIAL SEQUENCE
  Engineered IL6 binding polypeptide
VDAKYAKEERMAWTEIHNLPNLTIEQMAAFITKLFDDPSQSSELLSEAKKLNDSQAPK

SEQ ID NO: 1088 - protein, 58 aa, ARTIFICIAL SEQUENCE
  Engineered IL6 binding polypeptide
VDAKYAKEEEWAWKEIHILPNLTVEQVAAFITKLFDDPSQSSELLSEAKKLNDSQAPK

SEQ ID NO: 1089 - protein, 58 aa, ARTIFICIAL SEQUENCE
  Engineered IL6 binding polypeptide
VDAKYAKEEKFAWTEIHKLPNLTVDQMAAFITKLFDDPSQSSELLSEAKKLNDSQAPK

SEQ ID NO: 1090 - protein, 58 aa, ARTIFICIAL SEQUENCE
  Engineered IL6 binding polypeptide
VDAKYAKEEHYAWQEIHKLPNLTIDQMAAFITKLFDDPSQSSELLSEAKKLNDSQAPK

SEQ ID NO: 1091 - protein, 58 aa, ARTIFICIAL SEQUENCE
  Engineered IL6 binding polypeptide
VDAKYAKEERKAWYEIHILPNLTITQIAAFITKLFDDPSQSSELLSEAKKLNDSQAPK

SEQ ID NO: 1092 - protein, 58 aa, ARTIFICIAL SEQUENCE
  Engineered IL6 binding polypeptide
VDAKYAKEERYAWTEIHKLPNLTVDQVAAFISKLFDDPSQSSELLSEAKKLNDSQAPK

SEQ ID NO: 1093 - protein, 58 aa, ARTIFICIAL SEQUENCE
  Engineered IL6 binding polypeptide
VDAKYAKEEKEAWYEIHILPNLTVSQIAAFITKLFDDPSQSSELLSEAKKLNDSQAPK

SEQ ID NO: 1094 - protein, 58 aa, ARTIFICIAL SEQUENCE
  Engineered IL6 binding polypeptide
VDAKYAKEEYSAWFEIHILPNLTVEQMAAFISKLFDDPSQSSELLSEAKKLNDSQAPK

SEQ ID NO: 1095 - protein, 58 aa, ARTIFICIAL SEQUENCE
  Engineered IL6 binding polypeptide
VDAKYAKEERMAWNEIHKLPNLTIDQMAAFISKLFDDPSQSSELLSEAKKLNDSQAPK

SEQ ID NO: 1096 - protein, 58 aa, ARTIFICIAL SEQUENCE
  Engineered IL6 binding polypeptide
VDAKYAKEEAKAWTEIHLLPNLTVNQVAAFITKLFDDPSQSSELLSEAKKLNDSQAPK

SEQ ID NO: 1097 - protein, 58 aa, ARTIFICIAL SEQUENCE
  Engineered IL6 binding polypeptide
VDAKYAKEEKFAWREIHLLPNLTIEQMAAFISKLFDDPSQSSELLSEAKKLNDSQAPK

SEQ ID NO: 1098 - protein, 58 aa, ARTIFICIAL SEQUENCE
  Engineered IL6 binding polypeptide
VDAKYAKEEANAWHEIHLLPNLTIDQMAAFITKLFDDPSQSSELLSEAKKLNDSQAPK

SEQ ID NO: 1099 - protein, 58 aa, ARTIFICIAL SEQUENCE
  Engineered IL6 binding polypeptide
VDAKYAKEEKHAWNEIHRLPNLTVEQMAAFITKLFDDPSQSSELLSEAKKLNDSQAPK

SEQ ID NO: 1100 - protein, 58 aa, ARTIFICIAL SEQUENCE
  Engineered IL6 binding polypeptide
VDAKYAKEEHMAWTEIHALPNLTVDQMAAFISKLFDDPSQSSELLSEAKKLNDSQAPK

SEQ ID NO: 1101 - protein, 58 aa, ARTIFICIAL SEQUENCE
  Engineered IL6 binding polypeptide
VDAKYAKEEYEAWMEIHNLPNLTVDQMAAFITKLFDDPSQSSELLSEAKKLNDSQAPK

SEQ ID NO: 1102 - protein, 58 aa, ARTIFICIAL SEQUENCE
  Engineered IL6 binding polypeptide
VDAKYAKEERAAWYEIHILPNLTVEQMAAFITKLFDDPSQSSELLSEAKKLNDSQAPK

SEQ ID NO: 1103 - protein, 58 aa, ARTIFICIAL SEQUENCE
  Engineered IL6 binding polypeptide
VDAKYAKEEKNAWYEIHLLPNLTVVQMAAFITKLFDDPSQSSELLSEAKKLNDSQAPK

SEQ ID NO: 1104 - protein, 58 aa, ARTIFICIAL SEQUENCE
  Engineered IL6 binding polypeptide
VDAKYAKEEQIAWYEIHILPNLTVDQVAAFISKLFDDPSQSSELLSEAKKLNDSQAPK

SEQ ID NO: 1105 - protein, 58 aa, ARTIFICIAL SEQUENCE
  Engineered IL6 binding polypeptide
VDAKYAKEEYYAWTEIHRLPNLTVDQMAAFITKLFDDPSQSSELLSEAKKLNDSQAPK

SEQ ID NO: 1106 - protein, 58 aa, ARTIFICIAL SEQUENCE
  Engineered IL6 binding polypeptide
VDAKYAKEEADAWFEIHILPNLTVDQIAAFITKLFDDPSQSSELLSEAKKLNDSQAPK

SEQ ID NO: 1107 - protein, 58 aa, ARTIFICIAL SEQUENCE
  Engineered IL6 binding polypeptide
VDAKYAKEEKEAWMEIHKLPNLTVDQMAAFITKLFDDPSQSSELLSEAKKLNDSQAPK

SEQ ID NO: 1108 - protein, 58 aa, ARTIFICIAL SEQUENCE
  Engineered IL6 binding polypeptide
VDAKYAKEEYLAWIEIHALPNLTVSQMAAFITKLFDDPSQSSELLSEAKKLNDSQAPK

SEQ ID NO: 1109 - protein, 58 aa, ARTIFICIAL SEQUENCE
  Engineered IL6 binding polypeptide
VDAKYAKEEAFAWWEIHKLPNLTINQMAAFITKLFDDPSQSSELLSEAKKLNDSQAPK

SEQ ID NO: 1110 - protein, 58 aa, ARTIFICIAL SEQUENCE
  Engineered IL6 binding polypeptide
VDAKYAKEEYNAWFEIHILPNLTISQMAAFITKLFDDPSQSSELLSEAKKLNDSQAPK

SEQ ID NO: 1111 - protein, 58 aa, ARTIFICIAL SEQUENCE
  Engineered IL6 binding polypeptide
VDAKYAKEEKEAWREIHILPNLTVDQMAAFISKLFDDPSQSSELLSEAKKLNDSQAPK

SEQ ID NO: 1112 - protein, 58 aa, ARTIFICIAL SEQUENCE
  Engineered IL6 binding polypeptide
VDAKYAKEEKKAWHEIHILPNLTIGQMAAFISKLFDDPSQSSELLSEAKKLNDSQAPK

SEQ ID NO: 1113 - protein, 58 aa, ARTIFICIAL SEQUENCE
  Engineered IL6 binding polypeptide
VDAKYAKEEYHAWTEIHKLPNLTINQMAAFISKLFDDPSQSSELLSEAKKLNDSQAPK

SEQ ID NO: 1114 - protein, 58 aa, ARTIFICIAL SEQUENCE
  Engineered IL6 binding polypeptide
VDAKYAKEEFSAWYEIHLLPNLTVDQMAAFITKLFDDPSQSSELLSEAKKLNDSQAPK

SEQ ID NO: 1115 - protein, 58 aa, ARTIFICIAL SEQUENCE
  Engineered IL6 binding polypeptide
VDAKYAKEERAAWWEIHTLPNLTVDQMAAFISKLFDDPSQSSELLSEAKKLNDSQAPK

SEQ ID NO: 1116 - protein, 58 aa, ARTIFICIAL SEQUENCE
  Engineered IL6 binding polypeptide
VDAKYAKEEYEAWVEIHLLPNLTIDQMAAFISKLFDDPSQSSELLSEAKKLNDSQAPK

SEQ ID NO: 1117 - protein, 58 aa, ARTIFICIAL SEQUENCE
  Engineered IL6 binding polypeptide
VDAKYAKEEAEAWVEIHLLPNLTVNQMAAFITKLFDDPSQSSELLSEAKKLNDSQAPK

SEQ ID NO: 1118 - protein, 58 aa, ARTIFICIAL SEQUENCE
  Engineered IL6 binding polypeptide
VDAKYAKEEAKAWHEIHILPNLTITQIAAFITKLFDDPSQSSELLSEAKKLNDSQAPK

SEQ ID NO: 1119 - protein, 58 aa, ARTIFICIAL SEQUENCE
  Engineered IL6 binding polypeptide
VDAKYAKEEFYAWNEIHKLPNLTVNQMAAFITKLFDDPSQSSELLSEAKKLNDSQAPK

SEQ ID NO: 1120 - protein, 58 aa, ARTIFICIAL SEQUENCE
  Engineered IL6 binding polypeptide
VDAKYAKEEYLAWTEIHLLPNLTIEQMAAFITKLFDDPSQSSELLSEAKKLNDSQAPK

SEQ ID NO: 1121 - protein, 58 aa, ARTIFICIAL SEQUENCE
  Engineered IL6 binding polypeptide
VDAKYAKEEHAAWREIHALPNLTVDQMAAFISKLFDDPSQSSELLSEAKKLNDSQAPK

SEQ ID NO: 1122 - protein, 58 aa, ARTIFICIAL SEQUENCE
  Engineered IL6 binding polypeptide
VDAKYAKEEQRAWMEIHLLPNLTIEQIAAFISKLFDDPSQSSELLSEAKKLNDSQAPK

SEQ ID NO: 1123 - protein, 58 aa, ARTIFICIAL SEQUENCE
  Engineered IL6 binding polypeptide
VDAKYAKEERDAWTEIHKLPNLTVDQMAAFITKLFDDPSQSSELLSEAKKLNDSQAPK

SEQ ID NO: 1124 - protein, 58 aa, ARTIFICIAL SEQUENCE
  Engineered IL6 binding polypeptide
VDAKYAKEERDAWFEIHRLPNLTVDQMAAFITKLFDDPSQSSELLSEAKKLNDSQAPK

SEQ ID NO: 1125 - protein, 58 aa, ARTIFICIAL SEQUENCE
  Engineered IL6 binding polypeptide
VDAKYAKEESYAWTEIHKLPNLTIDQMAAFITKLFDDPSQSSELLSEAKKLNDSQAPK

SEQ ID NO: 1126 - protein, 58 aa, ARTIFICIAL SEQUENCE
  Engineered IL6 binding polypeptide
VDAKYAKEEKFAWKEIHILPNLTIDQIAAFITKLFDDPSQSSELLSEAKKLNDSQAPK

SEQ ID NO: 1127 - protein, 58 aa, ARTIFICIAL SEQUENCE
  Engineered IL6 binding polypeptide
VDAKYAKEEHRAWMEIHQLPNLTVDQMAAFITKLFDDPSQSSELLSEAKKLNDSQAPK

SEQ ID NO: 1128 - protein, 58 aa, ARTIFICIAL SEQUENCE
  Engineered IL6 binding polypeptide
VDAKYAKEERTAWFEIHKLPNLTVDQMAAFITKLFDDPSQSSELLSEAKKLNDSQAPK

SEQ ID NO: 1129 - protein, 58 aa, ARTIFICIAL SEQUENCE
  Engineered IL6 binding polypeptide
VDAKYAKEERYAWWEIHKLPNLTVEQVAAFITKLFDDPSQSSELLSEAKKLNDSQAPK

SEQ ID NO: 1130 - protein, 58 aa, ARTIFICIAL SEQUENCE
  Engineered IL6 binding polypeptide
VDAKYAKEEEEAWNEIHRLPNLTVVQMAAFISKLFDDPSQSSELLSEAKKLNDSQAPK

SEQ ID NO: 1131 - protein, 58 aa, ARTIFICIAL SEQUENCE
  Engineered IL6 binding polypeptide
VDAKYAKEEYEAWVEIHILPNLTVEQMAAFITKLFDDPSQSSELLSEAKKLNDSQAPK

SEQ ID NO: 1132 - protein, 58 aa, ARTIFICIAL SEQUENCE
  Engineered IL6 binding polypeptide
VDAKYAKEEYHAWTEIHLLPNLTIEQMAAFITKLFDDPSQSSELLSEAKKLNDSQAPK

SEQ ID NO: 1133 - protein, 58 aa, ARTIFICIAL SEQUENCE
  Engineered IL6 binding polypeptide
VDAKYAKEEYNAWYEIHVLPNLTIDQIAAFITKLFDDPSQSSELLSEAKKLNDSQAPK

SEQ ID NO: 1134 - protein, 58 aa, ARTIFICIAL SEQUENCE
  Engineered IL6 binding polypeptide
VDAKYAKEERKAWYEIHILPNLTVHQIAAFITKLFDDPSQSSELLSEAKKLNDSQAPK

SEQ ID NO: 1135 - protein, 58 aa, ARTIFICIAL SEQUENCE
  Engineered IL6 binding polypeptide
VDAKYAKEEWAAWIEIHSLPNLTVDQMAAFITKLFDDPSQSSELLSEAKKLNDSQAPK

SEQ ID NO: 1136 - protein, 58 aa, ARTIFICIAL SEQUENCE
  Engineered IL6 binding polypeptide
VDAKYAKEEAIAWSEIHSLPNLTVGQMAAFITKLFDDPSQSSELLSEAKKLNDSQAPK

SEQ ID NO: 1137 - protein, 58 aa, ARTIFICIAL SEQUENCE
  Engineered IL6 binding polypeptide
VDAKYAKEEKYAWTEIHILPNLTIDQMAAFISKLFDDPSQSSELLSEAKKLNDSQAPK

SEQ ID NO: 1138 - protein, 58 aa, ARTIFICIAL SEQUENCE
  Engineered IL6 binding polypeptide
VDAKYAKEEHTAWREIHLLPNLTISQMAAFITKLFDDPSQSSELLSEAKKLNDSQAPK

SEQ ID NO: 1139 - protein, 58 aa, ARTIFICIAL SEQUENCE
  Engineered IL6 binding polypeptide
VDAKYAKEEYTAWYEIHLLPNLTIEQMAAFISKLFDDPSQSSELLSEAKKLNDSQAPK

SEQ ID NO: 1140 - protein, 58 aa, ARTIFICIAL SEQUENCE
  Engineered IL6 binding polypeptide
VDAKYAKEEYEAWYEIHILPNLTVRQMAAFISKLFDDPSQSSELLSEAKKLNDSQAPK

SEQ ID NO: 1141 - protein, 58 aa, ARTIFICIAL SEQUENCE
  Engineered IL6 binding polypeptide
VDAKYAKEEKHAWTEIHLLPNLTISQMAAFITKLFDDPSQSSELLSEAKKLNDSQAPK

SEQ ID NO: 1142 - protein, 58 aa, ARTIFICIAL SEQUENCE
  Engineered IL6 binding polypeptide
VDAKYAKEEYTAWYEIHVLPNLTIRQMAAFITKLFDDPSQSSELLSEAKKLNDSQAPK

SEQ ID NO: 1143 - protein, 58 aa, ARTIFICIAL SEQUENCE
  Engineered IL6 binding polypeptide
VDAKYAKEEQRAWYEIHTLPNLTIDQMAAFITKLFDDPSQSSELLSEAKKLNDSQAPK

SEQ ID NO: 1144 - protein, 58 aa, ARTIFICIAL SEQUENCE
  Engineered IL6 binding polypeptide
VDAKYAKEEAVAWKEIHLLPNLTIDQIAAFISKLFDDPSQSSELLSEAKKLNDSQAPK

SEQ ID NO: 1145 - protein, 58 aa, ARTIFICIAL SEQUENCE
  Engineered IL6 binding polypeptide
VDAKYAKEEYRAWMEIHALPNLTIVQIAAFITKLFDDPSQSSELLSEAKKLNDSQAPK

SEQ ID NO: 1146 - protein, 58 aa, ARTIFICIAL SEQUENCE
  Engineered IL6 binding polypeptide
VDAKYAKEERSAWNEIHKLPNLTIDQMAAFITKLFDDPSQSSELLSEAKKLNDSQAPK

SEQ ID NO: 1147 - protein, 58 aa, ARTIFICIAL SEQUENCE
  Engineered IL6 binding polypeptide
VDAKYAKEEAEAWFEIHILPNLTVGQIAAFITKLFDDPSQSSELLSEAKKLNDSQAPK

SEQ ID NO: 1148 - protein, 58 aa, ARTIFICIAL SEQUENCE
  Engineered IL6 binding polypeptide
VDAKYAKEEKMAWNEIHKLPNLTVEQIAAFITKLFDDPSQSSELLSEAKKLNDSQAPK

SEQ ID NO: 1149 - protein, 58 aa, ARTIFICIAL SEQUENCE
  Engineered IL6 binding polypeptide
VDAKYAKEERTAWMEIHKLPNLTIDQMAAFISKLFDDPSQSSELLSEAKKLNDSQAPK

SEQ ID NO: 1150 - protein, 58 aa, ARTIFICIAL SEQUENCE
  Engineered IL6 binding polypeptide
VDAKYAKEEYEAWYEIHALPNLTLHQMAAFISKLFDDPSQSSELLSEAKKLNDSQAPK

SEQ ID NO: 1151 - protein, 58 aa, ARTIFICIAL SEQUENCE
  Engineered IL6 binding polypeptide
VDAKYAKEEYDAWFEIHVLPNLTVNQMAAFITKLFDDPSQSSELLSEAKKLNDSQAPK

SEQ ID NO: 1152 - protein, 58 aa, ARTIFICIAL SEQUENCE
  Engineered IL6 binding polypeptide
VDAKYAKEESLAWMEIHKLPNLTVDQVAAFITKLFDDPSQSSELLSEAKKLNDSQAPK

SEQ ID NO: 1153 - protein, 58 aa, ARTIFICIAL SEQUENCE
  Engineered IL6 binding polypeptide
VDAKYAKEERNAWWEIHALPNLTVNQMAAFITKLFDDPSQSSELLSEAKKLNDSQAPK

SEQ ID NO: 1154 - protein, 58 aa, ARTIFICIAL SEQUENCE
  Engineered IL6 binding polypeptide
VDAKYAKEEKKAWKEIHLLPNLTVNQMAAFISKLFDDPSQSSELLSEAKKLNDSQAPK

SEQ ID NO: 1155 - protein, 58 aa, ARTIFICIAL SEQUENCE
  Engineered IL6 binding polypeptide
VDAKYAKEEKYAWTEIHNLPNLTILQMAAFITKLFDDPSQSSELLSEAKKLNDSQAPK

SEQ ID NO: 1156 - protein, 58 aa, ARTIFICIAL SEQUENCE
  Engineered IL6 binding polypeptide
VDAKYAKEEYKAWVEIHLLPNLTVDQMAAFISKLFDDPSQSSELLSEAKKLNDSQAPK

SEQ ID NO: 1157 - protein, 58 aa, ARTIFICIAL SEQUENCE
  Engineered IL6 binding polypeptide
VDAKYAKEEHAAWLEIHLLPNLTVSQIAAFITKLFDDPSQSSELLSEAKKLNDSQAPK

SEQ ID NO: 1158 - protein, 58 aa, ARTIFICIAL SEQUENCE
  Engineered IL6 binding polypeptide
VDAKYAKEEYHAWWEIHALPNLTVEQMAAFITKLFDDPSQSSELLSEAKKLNDSQAPK

SEQ ID NO: 1159 - protein, 58 aa, ARTIFICIAL SEQUENCE
  Engineered IL6 binding polypeptide
VDAKYAKEERYAWNEIHRLPNLTVDQMAAFITKLFDDPSQSSELLSEAKKLNDSQAPK

SEQ ID NO: 1160 - protein, 58 aa, ARTIFICIAL SEQUENCE
  Engineered IL6 binding polypeptide
VDAKYAKEEAQAWMEIHLLPNLTIAQMAAFITKLFDDPSQSSELLSEAKKLNDSQAPK

SEQ ID NO: 1161 - protein, 58 aa, ARTIFICIAL SEQUENCE
  Engineered IL6 binding polypeptide
VDAKYAKEEREAWYEIHILPNLTVNQMAAFITKLFDDPSQSSELLSEAKKLNDSQAPK

SEQ ID NO: 1162 - protein, 58 aa, ARTIFICIAL SEQUENCE
  Engineered IL6 binding polypeptide
VDAKYAKEEAYAWNEIHKLPNLTVEQMAAFISKLFDDPSQSSELLSEAKKLNDSQAPK

SEQ ID NO: 1163 - protein, 58 aa, ARTIFICIAL SEQUENCE
  Engineered IL6 binding polypeptide
VDAKYAKEEYDAWAEIHRLPNLTISQMAAFITKLFDDPSQSSELLSEAKKLNDSQAPK

SEQ ID NO: 1164 - protein, 58 aa, ARTIFICIAL SEQUENCE
  Engineered IL6 binding polypeptide
VDAKYAKEEYHAWTEIHILPNLTINQIAAFITKLFDDPSQSSELLSEAKKLNDSQAPK

SEQ ID NO: 1165 - protein, 58 aa, ARTIFICIAL SEQUENCE
  Engineered IL6 binding polypeptide
VDAKYAKEERQAWFEIHILPNLTVGQMAAFISKLFDDPSQSSELLSEAKKLNDSQAPK

SEQ ID NO: 1166 - protein, 58 aa, ARTIFICIAL SEQUENCE
  Engineered IL6 binding polypeptide
VDAKYAKEEAEAWFEIHILPNLTVDQIAAFITKLFDDPSQSSELLSEAKKLNDSQAPK

SEQ ID NO: 1167 - protein, 58 aa, ARTIFICIAL SEQUENCE
  Engineered IL6 binding polypeptide
VDAKYAKEEKKAWYEIHILPNLTVYQMAAFITKLFDDPSQSSELLSEAKKLNDSQAPK

SEQ ID NO: 1168 - protein, 58 aa, ARTIFICIAL SEQUENCE
  Engineered IL6 binding polypeptide
VDAKYAKEEKAAWHEIHILPNLTVHQMAAFITKLFDDPSQSSELLSEAKKLNDSQAPK

SEQ ID NO: 1169 - protein, 58 aa, ARTIFICIAL SEQUENCE
  Engineered IL6 binding polypeptide
VDAKYAKEEAQAWNEIHKLPNLTVEQMAAFISKLFDDPSQSSELLSEAKKLNDSQAPK

SEQ ID NO: 1170 - protein, 58 aa, ARTIFICIAL SEQUENCE
  Engineered IL6 binding polypeptide
VDAKYAKEEYEAWYEIHILPNLTVHQIAAFITKLFDDPSQSSELLSEAKKLNDSQAPK

SEQ ID NO: 1171 - protein, 58 aa, ARTIFICIAL SEQUENCE
  Engineered IL6 binding polypeptide
VDAKYAKEEYEAWMEIHLLPNLTVHQMAAFITKLFDDPSQSSELLSEAKKLNDSQAPK

SEQ ID NO: 1172 - protein, 58 aa, ARTIFICIAL SEQUENCE
  Engineered IL6 binding polypeptide
VDAKYAKEEYDAWFEIHVLPNLTINQMAAFITKLFDDPSQSSELLSEAKKLNDSQAPK

SEQ ID NO: 1173 - protein, 58 aa, ARTIFICIAL SEQUENCE
  Engineered IL6 binding polypeptide
VDAKYAKEEKRAWNEIHQLPNLTIEQIAAFITKLFDDPSQSSELLSEAKKLNDSQAPK

SEQ ID NO: 1174 - protein, 58 aa, ARTIFICIAL SEQUENCE
  Engineered IL6 binding polypeptide
VDAKYAKEEARAWWEIHLLPNLTVDQIAAFITKLFDDPSQSSELLSEAKKLNDSQAPK

SEQ ID NO: 1175 - protein, 58 aa, ARTIFICIAL SEQUENCE
  Engineered IL6 binding polypeptide
VDAKYAKEEKHAWREIHILPNLTVDQIAAFITKLFDDPSQSSELLSEAKKLNDSQAPK

SEQ ID NO: 1176 - protein, 58 aa, ARTIFICIAL SEQUENCE
  Engineered IL6 binding polypeptide
VDAKYAKEESRAWTEIHLLPNLTVDQMAAFITKLFDDPSQSSELLSEAKKLNDSQAPK

SEQ ID NO: 1177 - protein, 58 aa, ARTIFICIAL SEQUENCE
  Engineered IL6 binding polypeptide
VDAKYAKEEAEAWKEIHLLPNLTIGQIAAFITKLFDDPSQSSELLSEAKKLNDSQAPK

SEQ ID NO: 1178 - protein, 58 aa, ARTIFICIAL SEQUENCE
  Engineered IL6 binding polypeptide
VDAKYAKEEADAWKEIHLLPNLTIEQMAAFITKLFDDPSQSSELLSEAKKLNDSQAPK

SEQ ID NO: 1179 - protein, 58 aa, ARTIFICIAL SEQUENCE
  Engineered IL6 binding polypeptide
VDAKYAKEEYQAWMEIHILPNLTIEQMAAFITKLFDDPSQSSELLSEAKKLNDSQAPK

SEQ ID NO: 1180 - protein, 58 aa, ARTIFICIAL SEQUENCE
  Engineered IL6 binding polypeptide
VDAKYAKEEAHAWWEIHKLPNLTVNQMAAFITKLFDDPSQSSELLSEAKKLNDSQAPK

SEQ ID NO: 1181 - protein, 58 aa, ARTIFICIAL SEQUENCE
  Engineered IL6 binding polypeptide
VDAKYAKEEWYAWNEIHKLPNLTVDQMAAFISKLFDDPSQSSELLSEAKKLNDSQAPK

SEQ ID NO: 1182 - protein, 58 aa, ARTIFICIAL SEQUENCE
  Engineered IL6 binding polypeptide
VDAKYAKEEKKAWNEIHNLPNLTVDQMAAFITKLFDDPSQSSELLSEAKKLNDSQAPK

SEQ ID NO: 1183 - protein, 58 aa, ARTIFICIAL SEQUENCE
  Engineered IL6 binding polypeptide
VDAKYAKEEAAAWMEIHGLPNLTVDQVAAFISKLFDDPSQSSELLSEAKKLNDSQAPK

SEQ ID NO: 1184 - protein, 58 aa, ARTIFICIAL SEQUENCE
  Engineered IL6 binding polypeptide
VDAKYAKEEKFAWREIHILPNLTVEQMAAFITKLFDDPSQSSELLSEAKKLNDSQAPK

SEQ ID NO: 1185 - protein, 58 aa, ARTIFICIAL SEQUENCE
  Engineered IL6 binding polypeptide
VDAKYAKEEYHAWTEIHQLPNLTIDQMAAFISKLFDDPSQSSELLSEAKKLNDSQAPK

SEQ ID NO: 1186 - protein, 58 aa, ARTIFICIAL SEQUENCE
  Engineered IL6 binding polypeptide
VDAKYAKEEAMAWNEIHRLPNLTVNQMAAFITKLFDDPSQSSELLSEAKKLNDSQAPK

SEQ ID NO: 1187 - protein, 58 aa, ARTIFICIAL SEQUENCE
  Engineered IL6 binding polypeptide
VDAKYAKEEQKAWREIHILPNLTVNQMAAFISKLFDDPSQSSELLSEAKKLNDSQAPK

SEQ ID NO: 1188 - protein, 58 aa, ARTIFICIAL SEQUENCE
  Engineered IL6 binding polypeptide
VDAKYAKEEFAAWLEIHKLPNLTIDQMAAFITKLFDDPSQSSELLSEAKKLNDSQAPK

SEQ ID NO: 1189 - protein, 58 aa, ARTIFICIAL SEQUENCE
  Engineered IL6 binding polypeptide
VDAKYAKEEAYAWAEIHKLPNLTVNQMAAFITKLFDDPSQSSELLSEAKKLNDSQAPK

SEQ ID NO: 1190 - protein, 58 aa, ARTIFICIAL SEQUENCE
  Engineered IL6 binding polypeptide
VDAKYAKEEKDAWYEIHILPNLTVRQMAAFISKLFDDPSQSSELLSEAKKLNDSQAPK

SEQ ID NO: 1191 - protein, 58 aa, ARTIFICIAL SEQUENCE
  Engineered IL6 binding polypeptide
VDAKYAKEEKDAWMEIHLLPNLTVSQIAAFITKLFDDPSQSSELLSEAKKLNDSQAPK

SEQ ID NO: 1192 - protein, 58 aa, ARTIFICIAL SEQUENCE
  Engineered IL6 binding polypeptide
VDAKYAKEEKEAWTEIHKLPNLTINQMAAFISKLFDDPSQSSELLSEAKKLNDSQAPK

SEQ ID NO: 1193 - protein, 58 aa, ARTIFICIAL SEQUENCE
  Engineered IL6 binding polypeptide
VDAKYAKEEKDAWREIHILPNLTVDQMAAFISKLFDDPSQSSELLSEAKKLNDSQAPK

SEQ ID NO: 1194 - protein, 58 aa, ARTIFICIAL SEQUENCE
  Engineered IL6 binding polypeptide
VDAKYAKEEYRAWTEIHLLPNLTIEQMAAFISKLFDDPSQSSELLSEAKKLNDSQAPK

SEQ ID NO: 1195 - protein, 58 aa, ARTIFICIAL SEQUENCE
  Engineered IL6 binding polypeptide
VDAKYAKEEKFAWHEIHILPNLTVHQMAAFITKLFDDPSQSSELLSEAKKLNDSQAPK

SEQ ID NO: 1196 - protein, 58 aa, ARTIFICIAL SEQUENCE
  Engineered IL6 binding polypeptide
VDAKYAKEEWEAWLEIHALPNLTVEQMAAFITKLFDDPSQSSELLSEAKKLNDSQAPK

SEQ ID NO: 1197 - protein, 58 aa, ARTIFICIAL SEQUENCE
  Engineered IL6 binding polypeptide
VDAKYAKEEAAAWQEIHLLPNLTVGQIAAFITKLFDDPSQSSELLSEAKKLNDSQAPK

SEQ ID NO: 1198 - protein, 58 aa, ARTIFICIAL SEQUENCE
  Engineered IL6 binding polypeptide
VDAKYAKEEKVAWKEIHILPNLTVNQIAAFISKLFDDPSQSSELLSEAKKLNDSQAPK

SEQ ID NO: 1199 - protein, 58 aa, ARTIFICIAL SEQUENCE
  Engineered IL6 binding polypeptide
VDAKYAKEERVAWQEIHLLPNLTIEQMAAFITKLFDDPSQSSELLSEAKKLNDSQAPK

SEQ ID NO: 1200 - protein, 58 aa, ARTIFICIAL SEQUENCE
  Engineered IL6 binding polypeptide
VDAKYAKEEYEAWLEIHLLPNLTIDQMAAFITKLFDDPSQSSELLSEAKKLNDSQAPK

SEQ ID NO: 1201 - protein, 58 aa, ARTIFICIAL SEQUENCE
  Engineered IL6 binding polypeptide
VDAKYAKEEAEAWFEIHNLPNLTIDQMAAFITKLFDDPSQSSELLSEAKKLNDSQAPK

SEQ ID NO: 1202 - protein, 58 aa, ARTIFICIAL SEQUENCE
  Engineered IL6 binding polypeptide
VDAKYAKEEKYAWWEIHKLPNLTVRQMAAFITKLFDDPSQSSELLSEAKKLNDSQAPK

SEQ ID NO: 1203 - protein, 58 aa, ARTIFICIAL SEQUENCE
  Engineered IL6 binding polypeptide
VDAKYAKEEYDAWHEIHVLPNLTVSQIAAFISKLFDDPSQSSELLSEAKKLNDSQAPK

SEQ ID NO: 1204 - protein, 58 aa, ARTIFICIAL SEQUENCE
  Engineered IL6 binding polypeptide
VDAKYAKEEAAAWREIHLLPNLTVDQMAAFITKLFDDPSQSSELLSEAKKLNDSQAPK

SEQ ID NO: 1205 - protein, 58 aa, ARTIFICIAL SEQUENCE
  Engineered IL6 binding polypeptide
VDAKYAKEEKHAWNEIHKLPNLTVKQVAAFISKLFDDPSQSSELLSEAKKLNDSQAPK

SEQ ID NO: 1206 - protein, 58 aa, ARTIFICIAL SEQUENCE
  Engineered IL6 binding polypeptide
VDAKYAKEEYDAWTEIHLLPNLTIAQIAAFITKLFDDPSQSSELLSEAKKLNDSQAPK

SEQ ID NO: 1207 - protein, 58 aa, ARTIFICIAL SEQUENCE
  Engineered IL6 binding polypeptide
VDAKYAKEERKAWHEIHILPNLTVDQMAAFITKLFDDPSQSSELLSEAKKLNDSQAPK

SEQ ID NO: 1208 - protein, 58 aa, ARTIFICIAL SEQUENCE
  Engineered IL6 binding polypeptide
VDAKYAKEEHDAWHEIHLLPNLTVDQIAAFITKLFDDPSQSSELLSEAKKLNDSQAPK

SEQ ID NO: 1209 - protein, 58 aa, ARTIFICIAL SEQUENCE
  Engineered IL6 binding polypeptide
VDAKYAKEEYAAWNEIHKLPNLTIIQMAAFITKLFDDPSQSSELLSEAKKLNDSQAPK

SEQ ID NO: 1210 - protein, 58 aa, ARTIFICIAL SEQUENCE
  Engineered IL6 binding polypeptide
VDAKYAKEEYEAWMEIHLLPNLTIEQMAAFISKLFDDPSQSSELLSEAKKLNDSQAPK

SEQ ID NO: 1211 - protein, 58 aa, ARTIFICIAL SEQUENCE
  Engineered IL6 binding polypeptide
VDAKYAKEEKHAWIEIHALPNLTIDQMAAFISKLFDDPSQSSELLSEAKKLNDSQAPK

SEQ ID NO: 1212 - protein, 58 aa, ARTIFICIAL SEQUENCE
  Engineered IL6 binding polypeptide
VDAKYAKEEKYAWHEIHILPNLTVDQVAAFITKLFDDPSQSSELLSEAKKLNDSQAPK

SEQ ID NO: 1213 - protein, 58 aa, ARTIFICIAL SEQUENCE
  Engineered IL6 binding polypeptide
VDAKYAKEEKDAWHEIHILPNLTVDQMAAFITKLFDDPSQSSELLSEAKKLNDSQAPK

SEQ ID NO: 1214 - protein, 58 aa, ARTIFICIAL SEQUENCE
  Engineered IL6 binding polypeptide
VDAKYAKEEYHAWMEIHILPNLTIEQIAAFITKLFDDPSQSSELLSEAKKLNDSQAPK

SEQ ID NO: 1215 - protein, 58 aa, ARTIFICIAL SEQUENCE
  Engineered IL6 binding polypeptide
VDAKYAKEEYRAWHEIHILPNLTIQQMAAFITKLFDDPSQSSELLSEAKKLNDSQAPK

SEQ ID NO: 1216 - protein, 58 aa, ARTIFICIAL SEQUENCE
  Engineered IL6 binding polypeptide
VDAKYAKEEKFAWHEIHILPNLTVQQMAAFITKLFDDPSQSSELLSEAKKLNDSQAPK

SEQ ID NO: 1217 - protein, 58 aa, ARTIFICIAL SEQUENCE
  Engineered IL6 binding polypeptide
VDAKYAKEEKHAWTEIHLLPNLTVNQMAAFISKLFDDPSQSSELLSEAKKLNDSQAPK

SEQ ID NO: 1218 - protein, 58 aa, ARTIFICIAL SEQUENCE
  Engineered IL6 binding polypeptide
VDAKYAKEEEFAWREIHILPNLTISQIAAFITKLFDDPSQSSELLSEAKKLNDSQAPK

SEQ ID NO: 1219 - protein, 58 aa, ARTIFICIAL SEQUENCE
  Engineered IL6 binding polypeptide
VDAKYAKEEKMAWKEIHVLPNLTVDQMAAFITKLFDDPSQSSELLSEAKKLNDSQAPK

SEQ ID NO: 1220 - protein, 58 aa, ARTIFICIAL SEQUENCE
  Engineered IL6 binding polypeptide
VDAKYAKEEYAAWHEIHVLPNLTIGQMAAFITKLFDDPSQSSELLSEAKKLNDSQAPK

SEQ ID NO: 1221 - protein, 58 aa, ARTIFICIAL SEQUENCE
  Engineered IL6 binding polypeptide
VDAKYAKEEQYAWQEIHKLPNLTVEQMAAFITKLFDDPSQSSELLSEAKKLNDSQAPK

SEQ ID NO: 1222 - protein, 58 aa, ARTIFICIAL SEQUENCE
  Engineered IL6 binding polypeptide
VDAKYAKEEWEAWNEIHSLPNLTIDQIAAFITKLFDDPSQSSELLSEAKKLNDSQAPK

SEQ ID NO: 1223 - protein, 58 aa, ARTIFICIAL SEQUENCE
  Engineered IL6 binding polypeptide
VDAKYAKEEKMAWKEIHLLPNLTVEQMAAFITKLFDDPSQSSELLSEAKKLNDSQAPK

SEQ ID NO: 1224 - protein, 58 aa, ARTIFICIAL SEQUENCE
  Engineered IL6 binding polypeptide
VDAKYAKEEAHAWREIHNLPNLTIEQMAAFISKLFDDPSQSSELLSEAKKLNDSQAPK

SEQ ID NO: 1225 - protein, 58 aa, ARTIFICIAL SEQUENCE
  Engineered IL6 binding polypeptide
VDAKYAKEERRAWTEIHILPNLTVDQIAAFISKLFDDPSQSSELLSEAKKLNDSQAPK

SEQ ID NO: 1226 - protein, 58 aa, ARTIFICIAL SEQUENCE
  Engineered IL6 binding polypeptide
VDAKYAKEEYEAWMEIHLLPNLTINQIAAFITKLFDDPSQSSELLSEAKKLNDSQAPK

SEQ ID NO: 1227 - protein, 58 aa, ARTIFICIAL SEQUENCE
  Engineered IL6 binding polypeptide
VDAKYAKEEKHAWMEIHALPNLTIDQMAAFITKLFDDPSQSSELLSEAKKLNDSQAPK

SEQ ID NO: 1228 - protein, 58 aa, ARTIFICIAL SEQUENCE
  Engineered IL6 binding polypeptide
VDAKYAKEEHQAWHEIHILPNLTIQQMAAFITKLFDDPSQSSELLSEAKKLNDSQAPK

SEQ ID NO: 1229 - protein, 58 aa, ARTIFICIAL SEQUENCE
  Engineered IL6 binding polypeptide
VDAKYAKEEYYAWREIHLLPNLTVDQMAAFITKLFDDPSQSSELLSEAKKLNDSQAPK

SEQ ID NO: 1230 - protein, 58 aa, ARTIFICIAL SEQUENCE
  Engineered IL6 binding polypeptide
VDAKYAKEEQEAWMEIHKLPNLTIDQVAAFITKLFDDPSQSSELLSEAKKLNDSQAPK

SEQ ID NO: 1231 - protein, 58 aa, ARTIFICIAL SEQUENCE
  Engineered IL6 binding polypeptide
VDAKYAKEEAHAWTEIHSLPNLTVDQMAAFITKLFDDPSQSSELLSEAKKLNDSQAPK

SEQ ID NO: 1232 - protein, 58 aa, ARTIFICIAL SEQUENCE
  Engineered IL6 binding polypeptide
VDAKYAKEEKLAWKEIHLLPNLTISQMAAFITKLFDDPSQSSELLSEAKKLNDSQAPK

SEQ ID NO: 1233 - protein, 58 aa, ARTIFICIAL SEQUENCE
  Engineered IL6 binding polypeptide
VDAKYAKEEYDAWTEIHKLPNLTVDQMAAFISKLFDDPSQSSELLSEAKKLNDSQAPK

SEQ ID NO: 1234 - protein, 58 aa, ARTIFICIAL SEQUENCE
  Engineered IL6 binding polypeptide
VDAKYAKEEARAWMEIHNLPNLTVDQMAAFITKLFDDPSQSSELLSEAKKLNDSQAPK

SEQ ID NO: 1235 - protein, 58 aa, ARTIFICIAL SEQUENCE
  Engineered IL6 binding polypeptide
VDAKYAKEEYRAWTEIHLLPNLTVHQMAAFITKLFDDPSQSSELLSEAKKLNDSQAPK

SEQ ID NO: 1236 - protein, 58 aa, ARTIFICIAL SEQUENCE
  Engineered IL6 binding polypeptide
VDAKYAKEEYHAWYEIHILPNLTVEQIAAFITKLFDDPSQSSELLSEAKKLNDSQAPK

SEQ ID NO: 1237 - protein, 58 aa, ARTIFICIAL SEQUENCE
  Engineered IL6 binding polypeptide
VDAKYAKEESDAWKEIHLLPNLTIEQMAAFISKLFDDPSQSSELLSEAKKLNDSQAPK

SEQ ID NO: 1238 - protein, 58 aa, ARTIFICIAL SEQUENCE
  Engineered IL6 binding polypeptide
VDAKYAKEEAYAWREIHILPNLTVDQMAAFISKLFDDPSQSSELLSEAKKLNDSQAPK

SEQ ID NO: 1239 - protein, 58 aa, ARTIFICIAL SEQUENCE
  Engineered IL6 binding polypeptide
VDAKYAKEEAAAWNEIHRLPNLTIDQMAAFISKLFDDPSQSSELLSEAKKLNDSQAPK

SEQ ID NO: 1240 - protein, 58 aa, ARTIFICIAL SEQUENCE
  Engineered IL6 binding polypeptide
VDAKYAKEEYHAWWEIHKLPNLTVNQMAAFITKLFDDPSQSSELLSEAKKLNDSQAPK

SEQ ID NO: 1241 - protein, 58 aa, ARTIFICIAL SEQUENCE
  Engineered IL6 binding polypeptide
VDAKYAKEEKAAWYEIHKLPNLTIDQMAAFITKLFDDPSQSSELLSEAKKLNDSQAPK

SEQ ID NO: 1242 - protein, 58 aa, ARTIFICIAL SEQUENCE
  Engineered IL6 binding polypeptide
VDAKYAKEEKEAWTEIHLLPNLTVDQIAAFITKLFDDPSQSSELLSEAKKLNDSQAPK

SEQ ID NO: 1243 - protein, 58 aa, ARTIFICIAL SEQUENCE
  Engineered IL6 binding polypeptide
VDAKYAKEEKRAWYEIHGLPNLTISQMAAFISKLFDDPSQSSELLSEAKKLNDSQAPK

SEQ ID NO: 1244 - protein, 58 aa, ARTIFICIAL SEQUENCE
  Engineered IL6 binding polypeptide
VDAKYAKEEARAWYEIHILPNLTVHQMAAFITKLFDDPSQSSELLSEAKKLNDSQAPK

SEQ ID NO: 1245 - protein, 58 aa, ARTIFICIAL SEQUENCE
  Engineered IL6 binding polypeptide
VDAKYAKEEKTAWVEIHKLPNLTINQMAAFITKLFDDPSQSSELLSEAKKLNDSQAPK

SEQ ID NO: 1246 - protein, 58 aa, ARTIFICIAL SEQUENCE
  Engineered IL6 binding polypeptide
VDAKYAKEERDAWFEIHILPNLTVEQMAAFITKLFDDPSQSSELLSEAKKLNDSQAPK

SEQ ID NO: 1247 - protein, 58 aa, ARTIFICIAL SEQUENCE
  Engineered IL6 binding polypeptide
VDAKYAKEEAMAWKEIHGLPNLTIEQMAAFISKLFDDPSQSSELLSEAKKLNDSQAPK

SEQ ID NO: 1248 - protein, 58 aa, ARTIFICIAL SEQUENCE
  Engineered IL6 binding polypeptide
VDAKYAKEEQYAWREIHILPNLTVHQVAAFISKLFDDPSQSSELLSEAKKLNDSQAPK

SEQ ID NO: 1249 - protein, 58 aa, ARTIFICIAL SEQUENCE
  Engineered IL6 binding polypeptide
VDAKYAKEEWEAWIEIHNLPNLTVGQMAAFITKLFDDPSQSSELLSEAKKLNDSQAPK

SEQ ID NO: 1250 - protein, 58 aa, ARTIFICIAL SEQUENCE
  Engineered IL6 binding polypeptide
VDAKYAKEEYAAWTEIHTLPNLTVDQVAAFISKLFDDPSQSSELLSEAKKLNDSQAPK

SEQ ID NO: 1251 - protein, 58 aa, ARTIFICIAL SEQUENCE
  Engineered IL6 binding polypeptide
VDAKYAKEEEDAWHEIHLLPNLTIEQMAAFITKLFDDPSQSSELLSEAKKLNDSQAPK

SEQ ID NO: 1252 - protein, 58 aa, ARTIFICIAL SEQUENCE
  Engineered IL6 binding polypeptide
VDAKYAKEERNAWYEIHALPNLTVEQMAAFITKLFDDPSQSSELLSEAKKLNDSQAPK

SEQ ID NO: 1253 - protein, 58 aa, ARTIFICIAL SEQUENCE
  Engineered IL6 binding polypeptide
VDAKYAKEEKRAWYEIHILPNLTVEQIAAFITKLFDDPSQSSELLSEAKKLNDSQAPK

SEQ ID NO: 1254 - protein, 58 aa, ARTIFICIAL SEQUENCE
  Engineered IL6 binding polypeptide
VDAKYAKEEYQAWIEIHILPNLTISQMAAFITKLFDDPSQSSELLSEAKKLNDSQAPK

SEQ ID NO: 1255 - protein, 58 aa, ARTIFICIAL SEQUENCE
  Engineered IL6 binding polypeptide
VDAKYAKEEKRAWYEIHLLPNLTIGQMAAFITKLFDDPSQSSELLSEAKKLNDSQAPK

SEQ ID NO: 1256 - protein, 58 aa, ARTIFICIAL SEQUENCE
  Engineered IL6 binding polypeptide
VDAKYAKEEYLAWLEIHNLPNLTVDQMAAFITKLFDDPSQSSELLSEAKKLNDSQAPK

SEQ ID NO: 1257 - protein, 58 aa, ARTIFICIAL SEQUENCE
  Engineered IL6 binding polypeptide
VDAKYAKEEYFAWYEIHNLPNLTVDQMAAFITKLFDDPSQSSELLSEAKKLNDSQAPK

SEQ ID NO: 1258 - protein, 58 aa, ARTIFICIAL SEQUENCE
  Engineered IL6 binding polypeptide
VDAKYAKEEAFAWWEIHKLPNLTVEQMAAFITKLFDDPSQSSELLSEAKKLNDSQAPK

SEQ ID NO: 1259 - protein, 58 aa, ARTIFICIAL SEQUENCE
  Engineered IL6 binding polypeptide
VDAKYAKEESIAWQEIHKLPNLTIEQMAAFITKLFDDPSQSSELLSEAKKLNDSQAPK

SEQ ID NO: 1260 - protein, 58 aa, ARTIFICIAL SEQUENCE
  Engineered IL6 binding polypeptide
VDAKYAKEEWDAWNEIHLLPNLTINQMAAFITKLFDDPSQSSELLSEAKKLNDSQAPK

SEQ ID NO: 1261 - protein, 58 aa, ARTIFICIAL SEQUENCE
  Engineered IL6 binding polypeptide
VDAKYAKEEAYAWNEIHRLPNLTVEQMAAFITKLFDDPSQSSELLSEAKKLNDSQAPK

SEQ ID NO: 1262 - protein, 58 aa, ARTIFICIAL SEQUENCE
  Engineered IL6 binding polypeptide
VDAKYAKEEAEAWFEIHKLPNLTVGQMAAFITKLFDDPSQSSELLSEAKKLNDSQAPK

SEQ ID NO: 1263 - protein, 58 aa, ARTIFICIAL SEQUENCE
  Engineered IL6 binding polypeptide
VDAKYAKEEREAWHEIHILPNLTVEQVAAFITKLFDDPSQSSELLSEAKKLNDSQAPK

SEQ ID NO: 1264 - protein, 58 aa, ARTIFICIAL SEQUENCE
  Engineered IL6 binding polypeptide
VDAKYAKEEHDAWMEIHLLPNLTIEQMAAFITKLFDDPSQSSELLSEAKKLNDSQAPK

SEQ ID NO: 1265 - protein, 58 aa, ARTIFICIAL SEQUENCE
  Engineered IL6 binding polypeptide
VDAKYAKEEYSAWIEIHLLPNLTVSQMAAFITKLFDDPSQSSELLSEAKKLNDSQAPK

SEQ ID NO: 1266 - protein, 58 aa, ARTIFICIAL SEQUENCE
  Engineered IL6 binding polypeptide
VDAKYAKEEYDAWYEIHTLPNLTVDQVAAFITKLFDDPSQSSELLSEAKKLNDSQAPK

SEQ ID NO: 1267 - protein, 58 aa, ARTIFICIAL SEQUENCE
  Engineered IL6 binding polypeptide
VDAKYAKEEKMAWTEIHNLPNLTIDQMAAFITKLFDDPSQSSELLSEAKKLNDSQAPK

SEQ ID NO: 1268 - protein, 58 aa, ARTIFICIAL SEQUENCE
  Engineered IL6 binding polypeptide
VDAKYAKEEYAAWFEIHSLPNLTVEQMAAFITKLFDDPSQSSELLSEAKKLNDSQAPK

SEQ ID NO: 1269 - protein, 58 aa, ARTIFICIAL SEQUENCE
  Engineered IL6 binding polypeptide
VDAKYAKEERRAWDEIHRLPNLTIEQMAAFITKLFDDPSQSSELLSEAKKLNDSQAPK

SEQ ID NO: 1270 - protein, 58 aa, ARTIFICIAL SEQUENCE
  Engineered IL6 binding polypeptide
VDAKYAKEEYDAWLEIHLLPNLTIEQMAAFITKLFDDPSQSSELLSEAKKLNDSQAPK

SEQ ID NO: 1271 - protein, 58 aa, ARTIFICIAL SEQUENCE
  Engineered IL6 binding polypeptide
VDAKYAKEEYDAWNEIHTLPNLTIDQMAAFITKLFDDPSQSSELLSEAKKLNDSQAPK

SEQ ID NO: 1272 - protein, 58 aa, ARTIFICIAL SEQUENCE
  Engineered IL6 binding polypeptide
VDAKYAKEERVAWNEIHKLPNLTIDQMAAFITKLFDDPSQSSELLSEAKKLNDSQAPK

SEQ ID NO: 1273 - protein, 58 aa, ARTIFICIAL SEQUENCE
  Engineered IL6 binding polypeptide
VDAKYAKEEAHAWTEIHKLPNLTVDQMAAFITKLFDDPSQSSELLSEAKKLNDSQAPK

SEQ ID NO: 1274 - protein, 58 aa, ARTIFICIAL SEQUENCE
  Engineered IL6 binding polypeptide
VDAKYAKEEYRAWMEIHLLPNLTIDQMAAFITKLFDDPSQSSELLSEAKKLNDSQAPK

SEQ ID NO: 1275 - protein, 58 aa, ARTIFICIAL SEQUENCE
  Engineered IL6 binding polypeptide
VDAKYAKEESAAWTEIHLLPNLTIEQMAAFITKLFDDPSQSSELLSEAKKLNDSQAPK

SEQ ID NO: 1276 - protein, 58 aa, ARTIFICIAL SEQUENCE
  Engineered IL6 binding polypeptide
VDAKYAKEEYFAWTEIHVLPNLTVKQIAAFITKLFDDPSQSSELLSEAKKLNDSQAPK

SEQ ID NO: 1277 - protein, 58 aa, ARTIFICIAL SEQUENCE
  Engineered IL6 binding polypeptide
VDAKYAKEEFHAWSEIHLLPNLTVSQMAAFISKLFDDPSQSSELLSEAKKLNDSQAPK

SEQ ID NO: 1278 - protein, 58 aa, ARTIFICIAL SEQUENCE
  Engineered IL6 binding polypeptide
VDAKYAKEEYDAWTEIHALPNLTVDQVAAFITKLFDDPSQSSELLSEAKKLNDSQAPK

SEQ ID NO: 1279 - protein, 58 aa, ARTIFICIAL SEQUENCE
  Engineered IL6 binding polypeptide
VDAKYAKEEKAAWFEIHNLPNLTISQMAAFITKLFDDPSQSSELLSEAKKLNDSQAPK

SEQ ID NO: 1280 - protein, 58 aa, ARTIFICIAL SEQUENCE
  Engineered IL6 binding polypeptide
VDAKYAKEEYQAWIEIHALPNLTIEQMAAFITKLFDDPSQSSELLSEAKKLNDSQAPK

SEQ ID NO: 1281 - protein, 58 aa, ARTIFICIAL SEQUENCE
  Engineered IL6 binding polypeptide
VDAKYAKEEYDAWVEIHKLPNLTINQMAAFITKLFDDPSQSSELLSEAKKLNDSQAPK

SEQ ID NO: 1282 - protein, 58 aa, ARTIFICIAL SEQUENCE
  Engineered IL6 binding polypeptide
VDAKYAKEEQSAWMEIHILPNLTVSQIAAFISKLFDDPSQSSELLSEAKKLNDSQAPK

SEQ ID NO: 1283 - protein, 58 aa, ARTIFICIAL SEQUENCE
  Engineered IL6 binding polypeptide
VDAKYAKEERAAWNEIHSLPNLTVEQMAAFITKLFDDPSQSSELLSEAKKLNDSQAPK

SEQ ID NO: 1284 - protein, 58 aa, ARTIFICIAL SEQUENCE
  Engineered IL6 binding polypeptide
VDAKYAKEEHEAWNEIHKLPNLTIDQMAAFITKLFDDPSQSSELLSEAKKLNDSQAPK

SEQ ID NO: 1285 - protein, 58 aa, ARTIFICIAL SEQUENCE
  Engineered IL6 binding polypeptide
VDAKYAKEERFAWWEIHRLPNLTVRQVAAFISKLFDDPSQSSELLSEAKKLNDSQAPK

SEQ ID NO: 1286 - protein, 58 aa, ARTIFICIAL SEQUENCE
  Engineered IL6 binding polypeptide
VDAKYAKEEFEAWYEIHILPNLTVEQMAAFITKLFDDPSQSSELLSEAKKLNDSQAPK

SEQ ID NO: 1287 - protein, 58 aa, ARTIFICIAL SEQUENCE
  Engineered IL6 binding polypeptide
VDAKYAKEEKDAWNEIHRLPNLTVDQVAAFITKLFDDPSQSSELLSEAKKLNDSQAPK

SEQ ID NO: 1288 - protein, 58 aa, ARTIFICIAL SEQUENCE
  Engineered IL6 binding polypeptide
VDAKYAKEEARAWYEIHVLPNLTVHQIAAFITKLFDDPSQSSELLSEAKKLNDSQAPK

SEQ ID NO: 1289 - protein, 58 aa, ARTIFICIAL SEQUENCE
  Engineered IL6 binding polypeptide
VDAKYAKEERRAWNEIHKLPNLTVEQMAAFITKLFDDPSQSSELLSEAKKLNDSQAPK

SEQ ID NO: 1290 - protein, 58 aa, ARTIFICIAL SEQUENCE
  Engineered IL6 binding polypeptide
VDAKYAKEEYMAWDEIHRLPNLTVEQMAAFITKLFDDPSQSSELLSEAKKLNDSQAPK

SEQ ID NO: 1291 - protein, 58 aa, ARTIFICIAL SEQUENCE
  Engineered IL6 binding polypeptide
VDAKYAKEERNAWFEIHALPNLTIDQMAAFITKLFDDPSQSSELLSEAKKLNDSQAPK

SEQ ID NO: 1292 - protein, 58 aa, ARTIFICIAL SEQUENCE
  Engineered IL6 binding polypeptide
VDAKYAKEEAEAWQEIHLLPNLTVGQMAAFISKLFDDPSQSSELLSEAKKLNDSQAPK

SEQ ID NO: 1293 - protein, 58 aa, ARTIFICIAL SEQUENCE
  Engineered IL6 binding polypeptide
VDAKYAKEEKNAWYEIHLLPNLTIQQMAAFISKLFDDPSQSSELLSEAKKLNDSQAPK

SEQ ID NO: 1294 - protein, 58 aa, ARTIFICIAL SEQUENCE
  Engineered IL6 binding polypeptide
VDAKYAKEEAIAWHEIHLLPNLTITQMAAFITKLFDDPSQSSELLSEAKKLNDSQAPK

SEQ ID NO: 1295 - protein, 58 aa, ARTIFICIAL SEQUENCE
  Engineered IL6 binding polypeptide
VDAKYAKEEKDAWEEIHRLPNLTVTQMAAFISKLFDDPSQSSELLSEAKKLNDSQAPK

SEQ ID NO: 1296 - protein, 58 aa, ARTIFICIAL SEQUENCE
  Engineered IL6 binding polypeptide
VDAKYAKEEYDAWFEIHLLPNLTVQQIAAFITKLFDDPSQSSELLSEAKKLNDSQAPK

SEQ ID NO: 1297 - protein, 58 aa, ARTIFICIAL SEQUENCE
  Engineered IL6 binding polypeptide
VDAKYAKEEAAAWMEIHLLPNLTVEQMAAFITKLFDDPSQSSELLSEAKKLNDSQAPK

SEQ ID NO: 1298 - protein, 58 aa, ARTIFICIAL SEQUENCE
  Engineered IL6 binding polypeptide
VDAKYAKEERKAWNEIHQLPNLTIQQVAAFITKLFDDPSQSSELLSEAKKLNDSQAPK

SEQ ID NO: 1299 - protein, 58 aa, ARTIFICIAL SEQUENCE
  Engineered IL6 binding polypeptide
VDAKYAKEEYAAWWEIHALPNLTVEQVAAFITKLFDDPSQSSELLSEAKKLNDSQAPK

SEQ ID NO: 1300 - protein, 58 aa, ARTIFICIAL SEQUENCE
  Engineered IL6 binding polypeptide
VDAKYAKEEKEAWMEIHILPNLTIDQMAAFITKLFDDPSQSSELLSEAKKLNDSQAPK

SEQ ID NO: 1301 - protein, 58 aa, ARTIFICIAL SEQUENCE
  Engineered IL6 binding polypeptide
VDAKYAKEEKIAWKEIHLLPNLTISQMAAFITKLFDDPSQSSELLSEAKKLNDSQAPK

SEQ ID NO: 1302 - protein, 58 aa, ARTIFICIAL SEQUENCE
  Engineered IL6 binding polypeptide
VDAKYAKEEHAAWMEIHLLPNLTVDQMAAFITKLFDDPSQSSELLSEAKKLNDSQAPK

SEQ ID NO: 1303 - protein, 58 aa, ARTIFICIAL SEQUENCE
  Engineered IL6 binding polypeptide
VDAKYAKEEKDAWYEIHILPNLTVDQMAAFITKLFDDPSQSSELLSEAKKLNDSQAPK

SEQ ID NO: 1304 - protein, 58 aa, ARTIFICIAL SEQUENCE
  Engineered IL6 binding polypeptide
VDAKYAKEERAAWNEIHKLPNLTIEQMAAFITKLFDDPSQSSELLSEAKKLNDSQAPK

SEQ ID NO: 1305 - protein, 58 aa, ARTIFICIAL SEQUENCE
  Engineered IL6 binding polypeptide
VDAKYAKEEAAAWFEIHILPNLTVGQIAAFITKLFDDPSQSSELLSEAKKLNDSQAPK

SEQ ID NO: 1306 - protein, 58 aa, ARTIFICIAL SEQUENCE
  Engineered IL6 binding polypeptide
VDAKYAKEEKFAWTEIHNLPNLTVDQMAAFITKLFDDPSQSSELLSEAKKLNDSQAPK

SEQ ID NO: 1307 - protein, 58 aa, ARTIFICIAL SEQUENCE
  Engineered IL6 binding polypeptide
VDAKYAKEEWLAWNEIHLLPNLTVDQMAAFITKLFDDPSQSSELLSEAKKLNDSQAPK

SEQ ID NO: 1308 - protein, 58 aa, ARTIFICIAL SEQUENCE
  Engineered IL6 binding polypeptide
VDAKYAKEEQRAWREIHILPNLTIDQMAAFITKLFDDPSQSSELLSEAKKLNDSQAPK

SEQ ID NO: 1309 - protein, 58 aa, ARTIFICIAL SEQUENCE
  Engineered IL6 binding polypeptide
VDAKYAKEEFQAWREIHLLPNLTIEQMAAFITKLFDDPSQSSELLSEAKKLNDSQAPK

SEQ ID NO: 1310 - protein, 58 aa, ARTIFICIAL SEQUENCE
  Engineered IL6 binding polypeptide
VDAKYAKEERMAWHEIHILPNLTVSQVAAFITKLFDDPSQSSELLSEAKKLNDSQAPK

SEQ ID NO: 1311 - protein, 58 aa, ARTIFICIAL SEQUENCE
  Engineered IL6 binding polypeptide
VDAKYAKEEKKAWYEIHILPNLTVNQIAAFITKLFDDPSQSSELLSEAKKLNDSQAPK

SEQ ID NO: 1312 - protein, 58 aa, ARTIFICIAL SEQUENCE
  Engineered IL6 binding polypeptide
VDAKYAKEEYYAWNEIHKLPNLTVIQVAAFITKLFDDPSQSSELLSEAKKLNDSQAPK

SEQ ID NO: 1313 - protein, 58 aa, ARTIFICIAL SEQUENCE
  Engineered IL6 binding polypeptide
VDAKYAKEEADAWREIHLLPNLTLEQMAAFITKLFDDPSQSSELLSEAKKLNDSQAPK

SEQ ID NO: 1314 - protein, 58 aa, ARTIFICIAL SEQUENCE
  Engineered IL6 binding polypeptide
VDAKYAKEEYEAWNEIHRLPNLTIDQMAAFISKLFDDPSQSSELLSEAKKLNDSQAPK

SEQ ID NO: 1315 - protein, 58 aa, ARTIFICIAL SEQUENCE
  Engineered IL6 binding polypeptide
VDAKYAKEEKKAWWEIHALPNLTVNQVAAFISKLFDDPSQSSELLSEAKKLNDSQAPK

SEQ ID NO: 1316 - protein, 58 aa, ARTIFICIAL SEQUENCE
  Engineered IL6 binding polypeptide
VDAKYAKEEKTAWREIHLLPNLTIEQMAAFITKLFDDPSQSSELLSEAKKLNDSQAPK

SEQ ID NO: 1317 - protein, 58 aa, ARTIFICIAL SEQUENCE
  Engineered IL6 binding polypeptide
VDAKYAKEEKDAWYEIHLLPNLTVDQIAAFITKLFDDPSQSSELLSEAKKLNDSQAPK

SEQ ID NO: 1318 - protein, 58 aa, ARTIFICIAL SEQUENCE
  Engineered IL6 binding polypeptide
VDAKYAKEEYTAWYEIHILPNLTIKQMAAFISKLFDDPSQSSELLSEAKKLNDSQAPK

SEQ ID NO: 1319 - protein, 58 aa, ARTIFICIAL SEQUENCE
  Engineered IL6 binding polypeptide
VDAKYAKEEYHAWYEIHLLPNLTIEQIAAFITKLFDDPSQSSELLSEAKKLNDSQAPK

SEQ ID NO: 1320 - protein, 58 aa, ARTIFICIAL SEQUENCE
  Engineered IL6 binding polypeptide
VDAKYAKEEAHAWREIHLLPNLTVLQMAAFITKLFDDPSQSSELLSEAKKLNDSQAPK

SEQ ID NO: 1321 - protein, 58 aa, ARTIFICIAL SEQUENCE
  Engineered IL6 binding polypeptide
VDAKYAKEEYEAWNEIHKLPNLTIDQMAAFITKLFDDPSQSSELLSEAKKLNDSQAPK

SEQ ID NO: 1322 - protein, 58 aa, ARTIFICIAL SEQUENCE
  Engineered IL6 binding polypeptide
VDAKYAKEERAAWNEIHALPNLTIDQMAAFITKLFDDPSQSSELLSEAKKLNDSQAPK

SEQ ID NO: 1323 - protein, 58 aa, ARTIFICIAL SEQUENCE
  Engineered IL6 binding polypeptide
VDAKYAKEEFDAWVEIHLLPNLTIDQMAAFITKLFDDPSQSSELLSEAKKLNDSQAPK

SEQ ID NO: 1324 - protein, 58 aa, ARTIFICIAL SEQUENCE
  Engineered IL6 binding polypeptide
VDAKYAKEEKAAWKEIHILPNLTVDQMAAFITKLFDDPSQSSELLSEAKKLNDSQAPK

SEQ ID NO: 1325 - protein, 58 aa, ARTIFICIAL SEQUENCE
  Engineered IL6 binding polypeptide
VDAKYAKEEWDAWLEIHALPNLTVDQVAAFISKLFDDPSQSSELLSEAKKLNDSQAPK

SEQ ID NO: 1326 - protein, 58 aa, ARTIFICIAL SEQUENCE
  Engineered IL6 binding polypeptide
VDAKYAKEEYNAWYEIHSLPNLTVEQMAAFITKLFDDPSQSSELLSEAKKLNDSQAPK

SEQ ID NO: 1327 - protein, 58 aa, ARTIFICIAL SEQUENCE
  Engineered IL6 binding polypeptide
VDAKYAKEEWNAWNEIHKLPNLTVEQMAAFITKLFDDPSQSSELLSEAKKLNDSQAPK

SEQ ID NO: 1328 - protein, 58 aa, ARTIFICIAL SEQUENCE
  Engineered IL6 binding polypeptide
VDAKYAKEEKEAWFEIHILPNLTVEQIAAFISKLFDDPSQSSELLSEAKKLNDSQAPK

SEQ ID NO: 1329 - protein, 58 aa, ARTIFICIAL SEQUENCE
  Engineered IL6 binding polypeptide
VDAKYAKEEATAWWEIHKLPNLTVQQVAAFISKLFDDPSQSSELLSEAKKLNDSQAPK

SEQ ID NO: 1330 - protein, 58 aa, ARTIFICIAL SEQUENCE
  Engineered IL6 binding polypeptide
VDAKYAKEEYEAWYEIHILPNLTVGQIAAFITKLFDDPSQSSELLSEAKKLNDSQAPK

SEQ ID NO: 1331 - protein, 58 aa, ARTIFICIAL SEQUENCE
  Engineered IL6 binding polypeptide
VDAKYAKEEANAWKEIHLLPNLTVGQVAAFITKLFDDPSQSSELLSEAKKLNDSQAPK

SEQ ID NO: 1332 - protein, 58 aa, ARTIFICIAL SEQUENCE
  Engineered IL6 binding polypeptide
VDAKYAKEEKRAWHEIHVLPNLTVEQIAAFITKLFDDPSQSSELLSEAKKLNDSQAPK

SEQ ID NO: 1333 - protein, 58 aa, ARTIFICIAL SEQUENCE
  Engineered IL6 binding polypeptide
VDAKYAKEEYDAWVEIHLLPNLTIDQIAAFITKLFDDPSQSSELLSEAKKLNDSQAPK

SEQ ID NO: 1334 - protein, 58 aa, ARTIFICIAL SEQUENCE
  Engineered IL6 binding polypeptide
VDAKYAKEEAEAWFEIHILPNLTINQIAAFITKLFDDPSQSSELLSEAKKLNDSQAPK

SEQ ID NO: 1335 - protein, 58 aa, ARTIFICIAL SEQUENCE
  Engineered IL6 binding polypeptide
VDAKYAKEEWHAWNEIHKLPNLTIDQMAAFITKLFDDPSQSSELLSEAKKLNDSQAPK

SEQ ID NO: 1336 - protein, 58 aa, ARTIFICIAL SEQUENCE
  Engineered IL6 binding polypeptide
VDAKYAKEEYEAWFEIHILPNLTVDQIAAFITKLFDDPSQSSELLSEAKKLNDSQAPK

SEQ ID NO: 1337 - protein, 58 aa, ARTIFICIAL SEQUENCE
  Engineered IL6 binding polypeptide
VDAKYAKEEYEAWREIHLLPNLTVSQMAAFITKLFDDPSQSSELLSEAKKLNDSQAPK

SEQ ID NO: 1338 - protein, 58 aa, ARTIFICIAL SEQUENCE
  Engineered IL6 binding polypeptide
VDAKYAKEERAAWFEIHILPNLTISQMAAFITKLFDDPSQSSELLSEAKKLNDSQAPK

SEQ ID NO: 1339 - protein, 58 aa, ARTIFICIAL SEQUENCE
  Engineered IL6 binding polypeptide
VDAKYAKEEAQAWKEIHLLPNLTIEQMAAFISKLFDDPSQSSELLSEAKKLNDSQAPK

SEQ ID NO: 1340 - protein, 58 aa, ARTIFICIAL SEQUENCE
  Engineered IL6 binding polypeptide
VDAKYAKEEKAAWFEIHILPNLTIHQMAAFITKLFDDPSQSSELLSEAKKLNDSQAPK

SEQ ID NO: 1341 - protein, 58 aa, ARTIFICIAL SEQUENCE
  Engineered IL6 binding polypeptide
VDAKYAKEEYEAWIEIHNLPNLTIEQMAAFITKLFDDPSQSSELLSEAKKLNDSQAPK

SEQ ID NO: 1342 - protein, 58 aa, ARTIFICIAL SEQUENCE
  Engineered IL6 binding polypeptide
VDAKYAKEEKYAWVEIHKLPNLTVEQVAAFITKLFDDPSQSSELLSEAKKLNDSQAPK

SEQ ID NO: 1343 - protein, 58 aa, ARTIFICIAL SEQUENCE
  Engineered IL6 binding polypeptide
VDAKYAKEEYHAWWEIHLLPNLTVEQMAAFITKLFDDPSQSSELLSEAKKLNDSQAPK

SEQ ID NO: 1344 - protein, 58 aa, ARTIFICIAL SEQUENCE
  Engineered IL6 binding polypeptide
VDAKYAKEEKAAWNEIHLLPNLTIDQIAAFITKLFDDPSQSSELLSEAKKLNDSQAPK

SEQ ID NO: 1345 - protein, 58 aa, ARTIFICIAL SEQUENCE
  Engineered IL6 binding polypeptide
VDAKYAKEEYRAWIEIHLLPNLTVEQMAAFISKLFDDPSQSSELLSEAKKLNDSQAPK

SEQ ID NO: 1346 - protein, 58 aa, ARTIFICIAL SEQUENCE
  Engineered IL6 binding polypeptide
VDAKYAKEEHDAWFEIHLLPNLTIEQMAAFITKLFDDPSQSSELLSEAKKLNDSQAPK

SEQ ID NO: 1347 - protein, 58 aa, ARTIFICIAL SEQUENCE
  Engineered IL6 binding polypeptide
VDAKYAKEERNAWMEIHLLPNLTVEQMAAFITKLFDDPSQSSELLSEAKKLNDSQAPK

SEQ ID NO: 1348 - protein, 58 aa, ARTIFICIAL SEQUENCE
  Engineered IL6 binding polypeptide
VDAKYAKEEKHAWYEIHVLPNLTVDQMAAFITKLFDDPSQSSELLSEAKKLNDSQAPK

SEQ ID NO: 1349 - protein, 58 aa, ARTIFICIAL SEQUENCE
  Engineered IL6 binding polypeptide
VDAKYAKEEHDAWYEIHILPNLTIHQMAAFITKLFDDPSQSSELLSEAKKLNDSQAPK

SEQ ID NO: 1350 - protein, 58 aa, ARTIFICIAL SEQUENCE
  Engineered IL6 binding polypeptide
VDAKYAKEEKEAWYEIHLLPNLTVNQMAAFITKLFDDPSQSSELLSEAKKLNDSQAPK

SEQ ID NO: 1351 - protein, 58 aa, ARTIFICIAL SEQUENCE
  Engineered IL6 binding polypeptide
VDAKYAKEEAAAWMEIHLLPNLTVGQMAAFITKLFDDPSQSSELLSEAKKLNDSQAPK

SEQ ID NO: 1352 - protein, 58 aa, ARTIFICIAL SEQUENCE
  Engineered IL6 binding polypeptide
VDAKYAKEEAYAWREIHLLPNLTVDQMAAFITKLFDDPSQSSELLSEAKKLNDSQAPK

SEQ ID NO: 1353 - protein, 58 aa, ARTIFICIAL SEQUENCE
  Engineered IL6 binding polypeptide
VDAKYAKEEYQAWTEIHTLPNLTVDQMAAFITKLFDDPSQSSELLSEAKKLNDSQAPK

SEQ ID NO: 1354 - protein, 58 aa, ARTIFICIAL SEQUENCE
  Engineered IL6 binding polypeptide
VDAKYAKEEKDAWYEIHLLPNLTVDQMAAFITKLFDDPSQSSELLSEAKKLNDSQAPK

SEQ ID NO: 1355 - protein, 58 aa, ARTIFICIAL SEQUENCE
  Engineered IL6 binding polypeptide
VDAKYAKEEANAWWEIHLLPNLTVEQMAAFITKLFDDPSQSSELLSEAKKLNDSQAPK

SEQ ID NO: 1356 - protein, 58 aa, ARTIFICIAL SEQUENCE
  Engineered IL6 binding polypeptide
VDAKYAKEEAKAWHEIHILPNLTITQMAAFITKLFDDPSQSSELLSEAKKLNDSQAPK

SEQ ID NO: 1357 - protein, 58 aa, ARTIFICIAL SEQUENCE
  Engineered IL6 binding polypeptide
VDAKYAKEEWSAWVEIHSLPNLTVSQIAAFITKLFDDPSQSSELLSEAKKLNDSQAPK

SEQ ID NO: 1358 - protein, 58 aa, ARTIFICIAL SEQUENCE
  Engineered IL6 binding polypeptide
VDAKYAKEERRAWYEIHILPNLTVEQMAAFITKLFDDPSQSSELLSEAKKLNDSQAPK

SEQ ID NO: 1359 - protein, 58 aa, ARTIFICIAL SEQUENCE
  Engineered IL6 binding polypeptide
VDAKYAKEEKDAWFEIHVLPNLTVDQMAAFITKLFDDPSQSSELLSEAKKLNDSQAPK

SEQ ID NO: 1360 - protein, 58 aa, ARTIFICIAL SEQUENCE
  Engineered IL6 binding polypeptide
VDAKYAKEEKRAWLEIHNLPNLTIDQMAAFISKLFDDPSQSSELLSEAKKLNDSQAPK

SEQ ID NO: 1361 - protein, 58 aa, ARTIFICIAL SEQUENCE
  Engineered IL6 binding polypeptide
VDAKYAKEEHGAWTEIHLLPNLTIEQVAAFITKLFDDPSQSSELLSEAKKLNDSQAPK

SEQ ID NO: 1362 - protein, 58 aa, ARTIFICIAL SEQUENCE
  Engineered IL6 binding polypeptide
VDAKYAKEERKAWIEIHLLPNLTIEQMAAFITKLFDDPSQSSELLSEAKKLNDSQAPK

SEQ ID NO: 1363 - protein, 58 aa, ARTIFICIAL SEQUENCE
  Engineered IL6 binding polypeptide
VDAKYAKEERSAWTEIHLLPNLTIDQMAAFITKLFDDPSQSSELLSEAKKLNDSQAPK

SEQ ID NO: 1364 - protein, 58 aa, ARTIFICIAL SEQUENCE
  Engineered IL6 binding polypeptide
VDAKYAKEELKAWTEIHNLPNLTIDQMAAFITKLFDDPSQSSELLSEAKKLNDSQAPK

SEQ ID NO: 1365 - protein, 58 aa, ARTIFICIAL SEQUENCE
  Engineered IL6 binding polypeptide
VDAKYAKEEANAWYEIHILPNLTVDQVAAFITKLFDDPSQSSELLSEAKKLNDSQAPK

SEQ ID NO: 1366 - protein, 58 aa, ARTIFICIAL SEQUENCE
  Engineered IL6 binding polypeptide
VDAKYAKEEWQAWWEIHALPNLTVEQVAAFITKLFDDPSQSSELLSEAKKLNDSQAPK

SEQ ID NO: 1367 - protein, 58 aa, ARTIFICIAL SEQUENCE
  Engineered IL6 binding polypeptide
VDAKYAKEEYNAWLEIHSLPNLTVTQMAAFITKLFDDPSQSSELLSEAKKLNDSQAPK

SEQ ID NO: 1368 - protein, 58 aa, ARTIFICIAL SEQUENCE
  Engineered IL6 binding polypeptide
VDAKYAKEEKKAWTEIHTLPNLTVEQMAAFITKLFDDPSQSSELLSEAKKLNDSQAPK

SEQ ID NO: 1369 - protein, 58 aa, ARTIFICIAL SEQUENCE
  Engineered IL6 binding polypeptide
VDAKYAKEEKAAWYEIHLLPNLTVVQMAAFITKLFDDPSQSSELLSEAKKLNDSQAPK

SEQ ID NO: 1370 - protein, 58 aa, ARTIFICIAL SEQUENCE
  Engineered IL6 binding polypeptide
VDAKYAKEEKAAWREIHLLPNLTINQMAAFITKLFDDPSQSSELLSEAKKLNDSQAPK

SEQ ID NO: 1371 - protein, 58 aa, ARTIFICIAL SEQUENCE
  Engineered IL6 binding polypeptide
VDAKYAKEEFEAWVEIHLLPNLTIEQIAAFITKLFDDPSQSSELLSEAKKLNDSQAPK

SEQ ID NO: 1372 - protein, 58 aa, ARTIFICIAL SEQUENCE
  Engineered IL6 binding polypeptide
VDAKYAKEEYAAWVEIHNLPNLTVEQMAAFITKLFDDPSQSSELLSEAKKLNDSQAPK

SEQ ID NO: 1373 - protein, 58 aa, ARTIFICIAL SEQUENCE
  Engineered IL6 binding polypeptide
VDAKYAKEESDAWYEIHTLPNLTINQMAAFISKLFDDPSQSSELLSEAKKLNDSQAPK

SEQ ID NO: 1374 - protein, 58 aa, ARTIFICIAL SEQUENCE
  Engineered IL6 binding polypeptide
VDAKYAKEEKFAWTEIHILPNLTVDQMAAFITKLFDDPSQSSELLSEAKKLNDSQAPK

SEQ ID NO: 1375 - protein, 58 aa, ARTIFICIAL SEQUENCE
  Engineered IL6 binding polypeptide
VDAKYAKEEAEAWWEIHILPNLTVSQIAAFISKLFDDPSQSSELLSEAKKLNDSQAPK

SEQ ID NO: 1376 - protein, 58 aa, ARTIFICIAL SEQUENCE
  Engineered IL6 binding polypeptide
VDAKYAKEEYQAWFEIHLLPNLTINQMAAFISKLFDDPSQSSELLSEAKKLNDSQAPK

SEQ ID NO: 1377 - protein, 58 aa, ARTIFICIAL SEQUENCE
  Engineered IL6 binding polypeptide
VDAKYAKEEAKAWTEIHTLPNLTVDQMAAFITKLFDDPSQSSELLSEAKKLNDSQAPK

SEQ ID NO: 1378 - protein, 58 aa, ARTIFICIAL SEQUENCE
  Engineered IL6 binding polypeptide
VDAKYAKEEQLAWTEIHKLPNLTIDQMAAFITKLFDDPSQSSELLSEAKKLNDSQAPK

SEQ ID NO: 1379 - protein, 58 aa, ARTIFICIAL SEQUENCE
  Engineered IL6 binding polypeptide
VDAKYAKEEYDAWTEIHLLPNLTIEQMAAFITKLFDDPSQSSELLSEAKKLNDSQAPK

SEQ ID NO: 1380 - protein, 58 aa, ARTIFICIAL SEQUENCE
  Engineered IL6 binding polypeptide
VDAKYAKEEWDAWVEIHTLPNLTVDQMAAFITKLFDDPSQSSELLSEAKKLNDSQAPK

SEQ ID NO: 1381 - protein, 58 aa, ARTIFICIAL SEQUENCE
  Engineered IL6 binding polypeptide
VDAKYAKEEFEAWHEIHILPNLTVQQMAAFITKLFDDPSQSSELLSEAKKLNDSQAPK

SEQ ID NO: 1382 - protein, 58 aa, ARTIFICIAL SEQUENCE
  Engineered IL6 binding polypeptide
VDAKYAKEEWEAWVEIHNLPNLTIDQMAAFITKLFDDPSQSSELLSEAKKLNDSQAPK

SEQ ID NO: 1383 - protein, 58 aa, ARTIFICIAL SEQUENCE
  Engineered IL6 binding polypeptide
VDAKYAKEERAAWWEIHGLPNLTVDQMAAFITKLFDDPSQSSELLSEAKKLNDSQAPK

SEQ ID NO: 1384 - protein, 58 aa, ARTIFICIAL SEQUENCE
  Engineered IL6 binding polypeptide
VDAKYAKEERDAWHEIHRLPNLTIEQMAAFISKLFDDPSQSSELLSEAKKLNDSQAPK

SEQ ID NO: 1385 - protein, 58 aa, ARTIFICIAL SEQUENCE
  Engineered IL6 binding polypeptide
VDAKYAKEEKTAWTEIHILPNLTIHQMAAFISKLFDDPSQSSELLSEAKKLNDSQAPK

SEQ ID NO: 1386 - protein, 58 aa, ARTIFICIAL SEQUENCE
  Engineered IL6 binding polypeptide
VDAKYAKEEFDAWMEIHLLPNLTINQMAAFITKLFDDPSQSSELLSEAKKLNDSQAPK

SEQ ID NO: 1387 - protein, 58 aa, ARTIFICIAL SEQUENCE
  Engineered IL6 binding polypeptide
VDAKYAKEEHLAWVEIHNLPNLTVEQMAAFITKLFDDPSQSSELLSEAKKLNDSQAPK

SEQ ID NO: 1388 - protein, 58 aa, ARTIFICIAL SEQUENCE
  Engineered IL6 binding polypeptide
VDAKYAKEERHAWWEIHKLPNLTIEQMAAFITKLFDDPSQSSELLSEAKKLNDSQAPK

SEQ ID NO: 1389 - protein, 58 aa, ARTIFICIAL SEQUENCE
  Engineered IL6 binding polypeptide
VDAKYAKEEYDAWFEIHLLPNLTVEQMAAFITKLFDDPSQSSELLSEAKKLNDSQAPK

SEQ ID NO: 1390 - protein, 58 aa, ARTIFICIAL SEQUENCE
  Engineered IL6 binding polypeptide
VDAKYAKEEKWAWTEIHLLPNLTIEQMAAFISKLFDDPSQSSELLSEAKKLNDSQAPK

SEQ ID NO: 1391 - protein, 58 aa, ARTIFICIAL SEQUENCE
  Engineered IL6 binding polypeptide
VDAKYAKEEAKAWFEIHILPNLTIEQIAAFITKLFDDPSQSSELLSEAKKLNDSQAPK

SEQ ID NO: 1392 - protein, 58 aa, ARTIFICIAL SEQUENCE
  Engineered IL6 binding polypeptide
VDAKYAKEEYRAWTEIHLLPNLTIHQMAAFITKLFDDPSQSSELLSEAKKLNDSQAPK

SEQ ID NO: 1393 - protein, 58 aa, ARTIFICIAL SEQUENCE
  Engineered IL6 binding polypeptide
VDAKYAKEEKHAWTEIHILPNLTVEQMAAFITKLFDDPSQSSELLSEAKKLNDSQAPK

SEQ ID NO: 1394 - protein, 58 aa, ARTIFICIAL SEQUENCE
  Engineered IL6 binding polypeptide
VDAKYAKEEARAWTEIHTLPNLTIDQIAAFITKLFDDPSQSSELLSEAKKLNDSQAPK

SEQ ID NO: 1395 - protein, 58 aa, ARTIFICIAL SEQUENCE
  Engineered IL6 binding polypeptide
VDAKYAKEEYAAWVEIHSLPNLTVDQMAAFITKLFDDPSQSSELLSEAKKLNDSQAPK

SEQ ID NO: 1396 - protein, 58 aa, ARTIFICIAL SEQUENCE
  Engineered IL6 binding polypeptide
VDAKYAKEEYDAWYEIHLLPNLTINQMAAFITKLFDDPSQSSELLSEAKKLNDSQAPK

SEQ ID NO: 1397 - protein, 58 aa, ARTIFICIAL SEQUENCE
  Engineered IL6 binding polypeptide
VDAKYAKEEFNAWNEIHLLPNLTVTQMAAFITKLFDDPSQSSELLSEAKKLNDSQAPK

SEQ ID NO: 1398 - protein, 58 aa, ARTIFICIAL SEQUENCE
  Engineered IL6 binding polypeptide
VDAKYAKEEKAAWNEIHLLPNLTIDQMAAFISKLFDDPSQSSELLSEAKKLNDSQAPK

SEQ ID NO: 1399 - protein, 58 aa, ARTIFICIAL SEQUENCE
  Engineered IL6 binding polypeptide
VDAKYAKEERIAWFEIHILPNLTIKQMAAFISKLFDDPSQSSELLSEAKKLNDSQAPK

SEQ ID NO: 1400 - protein, 58 aa, ARTIFICIAL SEQUENCE
  Engineered IL6 binding polypeptide
VDAKYAKEEYKAWYEIHILPNLTVQQMAAFITKLFDDPSQSSELLSEAKKLNDSQAPK

SEQ ID NO: 1401 - protein, 58 aa, ARTIFICIAL SEQUENCE
  Engineered IL6 binding polypeptide
VDAKYAKEEQHAWYEIHILPNLTIDQMAAFITKLFDDPSQSSELLSEAKKLNDSQAPK

SEQ ID NO: 1402 - protein, 58 aa, ARTIFICIAL SEQUENCE
  Engineered IL6 binding polypeptide
VDAKYAKEERYAWFEIHALPNLTVSQMAAFITKLFDDPSQSSELLSEAKKLNDSQAPK

SEQ ID NO: 1403 - protein, 58 aa, ARTIFICIAL SEQUENCE
  Engineered IL6 binding polypeptide
VDAKYAKEEYKAWIEIHLLPNLTIDQIAAFISKLFDDPSQSSELLSEAKKLNDSQAPK

SEQ ID NO: 1404 - protein, 58 aa, ARTIFICIAL SEQUENCE
  Engineered IL6 binding polypeptide
VDAKYAKEERTAWFEIHLLPNLTVDQIAAFITKLFDDPSQSSELLSEAKKLNDSQAPK

SEQ ID NO: 1405 - protein, 58 aa, ARTIFICIAL SEQUENCE
  Engineered IL6 binding polypeptide
VDAKYAKEEKHAWWEIHKLPNLTINQMAAFITKLFDDPSQSSELLSEAKKLNDSQAPK

SEQ ID NO: 1406 - protein, 58 aa, ARTIFICIAL SEQUENCE
  Engineered IL6 binding polypeptide
VDAKYAKEEKMAWFEIHVLPNLTISQIAAFITKLFDDPSQSSELLSEAKKLNDSQAPK

SEQ ID NO: 1407 - protein, 58 aa, ARTIFICIAL SEQUENCE
  Engineered IL6 binding polypeptide
VDAKYAKEEFDAWTEIHLLPNLTVDQMAAFISKLFDDPSQSSELLSEAKKLNDSQAPK

SEQ ID NO: 1408 - protein, 58 aa, ARTIFICIAL SEQUENCE
  Engineered IL6 binding polypeptide
VDAKYAKEERDAWFEIHRLPNLTVSQMAAFITKLFDDPSQSSELLSEAKKLNDSQAPK

SEQ ID NO: 1409 - protein, 58 aa, ARTIFICIAL SEQUENCE
  Engineered IL6 binding polypeptide
VDAKYAKEEAVAWTEIHLLPNLTIDQMAAFITKLFDDPSQSSELLSEAKKLNDSQAPK

SEQ ID NO: 1410 - protein, 58 aa, ARTIFICIAL SEQUENCE
  Engineered IL6 binding polypeptide
VDAKYAKEEWYAWREIHILPNLTVEQVAAFITKLFDDPSQSSELLSEAKKLNDSQAPK

SEQ ID NO: 1411 - protein, 58 aa, ARTIFICIAL SEQUENCE
  Engineered IL6 binding polypeptide
VDAKYAKEEFHAWYEIHILPNLTVDQMAAFITKLFDDPSQSSELLSEAKKLNDSQAPK

SEQ ID NO: 1412 - protein, 58 aa, ARTIFICIAL SEQUENCE
  Engineered IL6 binding polypeptide
VDAKYAKEEYEAWTEIHLLPNLTIDQMAAFITKLFDDPSQSSELLSEAKKLNDSQAPK

SEQ ID NO: 1413 - protein, 58 aa, ARTIFICIAL SEQUENCE
  Engineered IL6 binding polypeptide
VDAKYAKEEWDAWTEIHALPNLTIDQMAAFITKLFDDPSQSSELLSEAKKLNDSQAPK

SEQ ID NO: 1414 - protein, 58 aa, ARTIFICIAL SEQUENCE
  Engineered IL6 binding polypeptide
VDAKYAKEESEAWTEIHLLPNLTIDQMAAFITKLFDDPSQSSELLSEAKKLNDSQAPK

SEQ ID NO: 1415 - protein, 58 aa, ARTIFICIAL SEQUENCE
  Engineered IL6 binding polypeptide
VDAKYAKEEFTAWSEIHNLPNLTVEQMAAFITKLFDDPSQSSELLSEAKKLNDSQAPK

SEQ ID NO: 1416 - protein, 58 aa, ARTIFICIAL SEQUENCE
  Engineered IL6 binding polypeptide
VDAKYAKEEADAWHEIHILPNLTVEQMAAFITKLFDDPSQSSELLSEAKKLNDSQAPK

SEQ ID NO: 1417 - protein, 58 aa, ARTIFICIAL SEQUENCE
  Engineered IL6 binding polypeptide
VDAKYAKEEKAAWFEIHILPNLTVDQMAAFITKLFDDPSQSSELLSEAKKLNDSQAPK

SEQ ID NO: 1418 - protein, 58 aa, ARTIFICIAL SEQUENCE
  Engineered IL6 binding polypeptide
VDAKYAKEERRAWHEIHILPNLTVEQMAAFISKLFDDPSQSSELLSEAKKLNDSQAPK

SEQ ID NO: 1419 - protein, 58 aa, ARTIFICIAL SEQUENCE
  Engineered IL6 binding polypeptide
VDAKYAKEERDAWWEIHKLPNLTVDQMAAFITKLFDDPSQSSELLSEAKKLNDSQAPK

SEQ ID NO: 1420 - protein, 58 aa, ARTIFICIAL SEQUENCE
  Engineered IL6 binding polypeptide
VDAKYAKEEAYAWKEIHILPNLTIDQMAAFISKLFDDPSQSSELLSEAKKLNDSQAPK

SEQ ID NO: 1421 - protein, 58 aa, ARTIFICIAL SEQUENCE
  Engineered IL6 binding polypeptide
VDAKYAKEERAAWTEIHNLPNLTIDQMAAFITKLFDDPSQSSELLSEAKKLNDSQAPK

SEQ ID NO: 1422 - protein, 58 aa, ARTIFICIAL SEQUENCE
  Engineered IL6 binding polypeptide
VDAKYAKEEYAAWTEIHKLPNLTIDQMAAFITKLFDDPSQSSELLSEAKKLNDSQAPK

SEQ ID NO: 1423 - protein, 58 aa, ARTIFICIAL SEQUENCE
  Engineered IL6 binding polypeptide
VDAKYAKEERTAWMEIHGLPNLTIEQMAAFISKLFDDPSQSSELLSEAKKLNDSQAPK

SEQ ID NO: 1424 - protein, 58 aa, ARTIFICIAL SEQUENCE
  Engineered IL6 binding polypeptide
VDAKYAKEEWTAWNEIHLLPNLTIEQMAAFITKLFDDPSQSSELLSEAKKLNDSQAPK

SEQ ID NO: 1425 - protein, 58 aa, ARTIFICIAL SEQUENCE
  Engineered IL6 binding polypeptide
VDAKYAKEEKDAWFEIHILPNLTVHQIAAFISKLFDDPSQSSELLSEAKKLNDSQAPK

SEQ ID NO: 1426 - protein, 58 aa, ARTIFICIAL SEQUENCE
  Engineered IL6 binding polypeptide
VDAKYAKEEKSAWREIHLLPNLTIEQMAAFISKLFDDPSQSSELLSEAKKLNDSQAPK

SEQ ID NO: 1427 - protein, 58 aa, ARTIFICIAL SEQUENCE
  Engineered IL6 binding polypeptide
VDAKYAKEEYTAWLEIHALPNLTITQMAAFITKLFDDPSQSSELLSEAKKLNDSQAPK

SEQ ID NO: 1428 - protein, 58 aa, ARTIFICIAL SEQUENCE
  Engineered IL6 binding polypeptide
VDAKYAKEEKMAWMEIHKLPNLTIDQMAAFITKLFDDPSQSSELLSEAKKLNDSQAPK

SEQ ID NO: 1429 - protein, 58 aa, ARTIFICIAL SEQUENCE
  Engineered IL6 binding polypeptide
VDAKYAKEEYHAWYEIHLLPNLTVEQIAAFITKLFDDPSQSSELLSEAKKLNDSQAPK

SEQ ID NO: 1430 - protein, 58 aa, ARTIFICIAL SEQUENCE
  Engineered IL6 binding polypeptide
VDAKYAKEEKDAWFEIHALPNLTVDQMAAFISKLFDDPSQSSELLSEAKKLNDSQAPK

SEQ ID NO: 1431 - protein, 58 aa, ARTIFICIAL SEQUENCE
  Engineered IL6 binding polypeptide
VDAKYAKEERAAWFEIHLLPNLTVEQMAAFITKLFDDPSQSSELLSEAKKLNDSQAPK

SEQ ID NO: 1432 - protein, 58 aa, ARTIFICIAL SEQUENCE
  Engineered IL6 binding polypeptide
VDAKYAKEEYMAWLEIHNLPNLTVEQMAAFITKLFDDPSQSSELLSEAKKLNDSQAPK

SEQ ID NO: 1433 - protein, 58 aa, ARTIFICIAL SEQUENCE
  Engineered IL6 binding polypeptide
VDAKYAKEEYIAWREIHLLPNLTIDQMAAFITKLFDDPSQSSELLSEAKKLNDSQAPK

SEQ ID NO: 1434 - protein, 58 aa, ARTIFICIAL SEQUENCE
  Engineered IL6 binding polypeptide
VDAKYAKEEKAAWHEIHVLPNLTISQMAAFITKLFDDPSQSSELLSEAKKLNDSQAPK

SEQ ID NO: 1435 - protein, 58 aa, ARTIFICIAL SEQUENCE
  Engineered IL6 binding polypeptide
VDAKYAKEEWQAWNEIHLLPNLTIDQMAAFISKLFDDPSQSSELLSEAKKLNDSQAPK

SEQ ID NO: 1436 - protein, 58 aa, ARTIFICIAL SEQUENCE
  Engineered IL6 binding polypeptide
VDAKYAKEEWEAWFEIHLLPNLTISQMAAFITKLFDDPSQSSELLSEAKKLNDSQAPK

SEQ ID NO: 1437 - protein, 58 aa, ARTIFICIAL SEQUENCE
  Engineered IL6 binding polypeptide
VDAKYAKEEYHAWWEIHKLPNLTISQMAAFITKLFDDPSQSSELLSEAKKLNDSQAPK

SEQ ID NO: 1438 - protein, 58 aa, ARTIFICIAL SEQUENCE
  Engineered IL6 binding polypeptide
VDAKYAKEEYAAWVEIHALPNLTVEQMAAFITKLFDDPSQSSELLSEAKKLNDSQAPK

SEQ ID NO: 1439 - protein, 58 aa, ARTIFICIAL SEQUENCE
  Engineered IL6 binding polypeptide
VDAKYAKEERMAWHEIHILPNLTVQQMAAFISKLFDDPSQSSELLSEAKKLNDSQAPK

SEQ ID NO: 1440 - protein, 58 aa, ARTIFICIAL SEQUENCE
  Engineered IL6 binding polypeptide
VDAKYAKEERDAWYEIHNLPNLTIDQMAAFISKLFDDPSQSSELLSEAKKLNDSQAPK

SEQ ID NO: 1441 - protein, 58 aa, ARTIFICIAL SEQUENCE
  Engineered IL6 binding polypeptide
VDAKYAKEESYAWWEIHKLPNLTVEQMAAFISKLFDDPSQSSELLSEAKKLNDSQAPK

SEQ ID NO: 1442 - protein, 58 aa, ARTIFICIAL SEQUENCE
  Engineered IL6 binding polypeptide
VDAKYAKEEKRAWKEIHILPNLTINQMAAFITKLFDDPSQSSELLSEAKKLNDSQAPK

SEQ ID NO: 1443 - protein, 58 aa, ARTIFICIAL SEQUENCE
  Engineered IL6 binding polypeptide
VDAKYAKEEKEAWFEIHALPNLTVEQIAAFITKLFDDPSQSSELLSEAKKLNDSQAPK

SEQ ID NO: 1444 - protein, 58 aa, ARTIFICIAL SEQUENCE
  Engineered IL6 binding polypeptide
VDAKYAKEEYEAWNEIHKLPNLTVSQMAAFISKLFDDPSQSSELLSEAKKLNDSQAPK

SEQ ID NO: 1445 - protein, 58 aa, ARTIFICIAL SEQUENCE
  Engineered IL6 binding polypeptide
VDAKYAKEEAAAWMEIHLLPNLTIDQMAAFITKLFDDPSQSSELLSEAKKLNDSQAPK

SEQ ID NO: 1446 - protein, 58 aa, ARTIFICIAL SEQUENCE
  Engineered IL6 binding polypeptide
VDAKYAKEERNAWEEIHLLPNLTINQIAAFITKLFDDPSQSSELLSEAKKLNDSQAPK

SEQ ID NO: 1447 - protein, 58 aa, ARTIFICIAL SEQUENCE
  Engineered IL6 binding polypeptide
VDAKYAKEEAYAWHEIHILPNLTVDQMAAFITKLFDDPSQSSELLSEAKKLNDSQAPK

SEQ ID NO: 1448 - protein, 58 aa, ARTIFICIAL SEQUENCE
  Engineered IL6 binding polypeptide
VDAKYAKEEANAWFEIHVLPNLTVEQMAAFITKLFDDPSQSSELLSEAKKLNDSQAPK

SEQ ID NO: 1449 - protein, 58 aa, ARTIFICIAL SEQUENCE
  Engineered IL6 binding polypeptide
VDAKYAKEEKNAWTEIHKLPNLTVDQMAAFITKLFDDPSQSSELLSEAKKLNDSQAPK

SEQ ID NO: 1450 - protein, 58 aa, ARTIFICIAL SEQUENCE
  Engineered IL6 binding polypeptide
VDAKYAKEEYDAWYEIHLLPNLTISQMAAFISKLFDDPSQSSELLSEAKKLNDSQAPK

SEQ ID NO: 1451 - protein, 58 aa, ARTIFICIAL SEQUENCE
  Engineered IL6 binding polypeptide
VDAKYAKEERLAWAEIHKLPNLTIEQVAAFISKLFDDPSQSSELLSEAKKLNDSQAPK

SEQ ID NO: 1452 - protein, 58 aa, ARTIFICIAL SEQUENCE
  Engineered IL6 binding polypeptide
VDAKYAKEERAAWNEIHILPNLTVQQMAAFITKLFDDPSQSSELLSEAKKLNDSQAPK

SEQ ID NO: 1453 - protein, 58 aa, ARTIFICIAL SEQUENCE
  Engineered IL6 binding polypeptide
VDAKYAKEEAAAWDEIHRLPNLTVDQIAAFITKLFDDPSQSSELLSEAKKLNDSQAPK

SEQ ID NO: 1454 - protein, 58 aa, ARTIFICIAL SEQUENCE
  Engineered IL6 binding polypeptide
VDAKYAKEEKEAWWEIHGLPNLTVNQMAAFITKLFDDPSQSSELLSEAKKLNDSQAPK

SEQ ID NO: 1455 - protein, 58 aa, ARTIFICIAL SEQUENCE
  Engineered IL6 binding polypeptide
VDAKYAKEERKAWYEIHTLPNLTINQMAAFITKLFDDPSQSSELLSEAKKLNDSQAPK

SEQ ID NO: 1456 - protein, 58 aa, ARTIFICIAL SEQUENCE
  Engineered IL6 binding polypeptide
VDAKYAKEERNAWYEIHILPNLTIEQMAAFITKLFDDPSQSSELLSEAKKLNDSQAPK

SEQ ID NO: 1457 - protein, 58 aa, ARTIFICIAL SEQUENCE
  Engineered IL6 binding polypeptide
VDAKYAKEEKLAWMEIHLLPNLTIEQMAAFITKLFDDPSQSSELLSEAKKLNDSQAPK

SEQ ID NO: 1458 - protein, 58 aa, ARTIFICIAL SEQUENCE
  Engineered IL6 binding polypeptide
VDAKYAKEEYMAWLEIHNLPNLTVDQMAAFITKLFDDPSQSSELLSEAKKLNDSQAPK

SEQ ID NO: 1459 - protein, 58 aa, ARTIFICIAL SEQUENCE
  Engineered IL6 binding polypeptide
VDAKYAKEESDAWREIHLLPNLTIEQMAAFISKLFDDPSQSSELLSEAKKLNDSQAPK

SEQ ID NO: 1460 - protein, 58 aa, ARTIFICIAL SEQUENCE
  Engineered IL6 binding polypeptide
VDAKYAKEEKEAWYEIHQLPNLTVNQMAAFISKLFDDPSQSSELLSEAKKLNDSQAPK

SEQ ID NO: 1461 - protein, 58 aa, ARTIFICIAL SEQUENCE
  Engineered IL6 binding polypeptide
VDAKYAKEEKQAWYEIHNLPNLTINQMAAFITKLFDDPSQSSELLSEAKKLNDSQAPK

SEQ ID NO: 1462 - protein, 58 aa, ARTIFICIAL SEQUENCE
  Engineered IL6 binding polypeptide
VDAKYAKEEYEAWTEIHRLPNLTIDQMAAFITKLFDDPSQSSELLSEAKKLNDSQAPK

SEQ ID NO: 1463 - protein, 58 aa, ARTIFICIAL SEQUENCE
  Engineered IL6 binding polypeptide
VDAKYAKEEKDAWYEIHVLPNLTISQMAAFITKLFDDPSQSSELLSEAKKLNDSQAPK

SEQ ID NO: 1464 - protein, 58 aa, ARTIFICIAL SEQUENCE
  Engineered IL6 binding polypeptide
VDAKYAKEERIAWYEIHILPNLTISQMAAFITKLFDDPSQSSELLSEAKKLNDSQAPK

SEQ ID NO: 1465 - protein, 58 aa, ARTIFICIAL SEQUENCE
  Engineered IL6 binding polypeptide
VDAKYAKEEQYAWTEIHKLPNLTIDQMAAFITKLFDDPSQSSELLSEAKKLNDSQAPK

SEQ ID NO: 1466 - protein, 58 aa, ARTIFICIAL SEQUENCE
  Engineered IL6 binding polypeptide
VDAKYAKEESDAWWEIHKLPNLTIDQMAAFITKLFDDPSQSSELLSEAKKLNDSQAPK

SEQ ID NO: 1467 - protein, 58 aa, ARTIFICIAL SEQUENCE
  Engineered IL6 binding polypeptide
VDAKYAKEEKFAWNEIHLLPNLTIEQMAAFITKLFDDPSQSSELLSEAKKLNDSQAPK

SEQ ID NO: 1468 - protein, 58 aa, ARTIFICIAL SEQUENCE
  Engineered IL6 binding polypeptide
VDAKYAKEERAAWYEIHLLPNLTVNQIAAFITKLFDDPSQSSELLSEAKKLNDSQAPK

SEQ ID NO: 1469 - protein, 58 aa, ARTIFICIAL SEQUENCE
  Engineered IL6 binding polypeptide
VDAKYAKEEFHAWWEIHKLPNLTVEQVAAFITKLFDDPSQSSELLSEAKKLNDSQAPK

SEQ ID NO: 1470 - protein, 58 aa, ARTIFICIAL SEQUENCE
  Engineered IL6 binding polypeptide
VDAKYAKEEKQAWLEIHILPNLTVGQIAAFITKLFDDPSQSSELLSEAKKLNDSQAPK

SEQ ID NO: 1471 - protein, 58 aa, ARTIFICIAL SEQUENCE
  Engineered IL6 binding polypeptide
VDAKYAKEEHLAWTEIHLLPNLTINQMAAFITKLFDDPSQSSELLSEAKKLNDSQAPK

SEQ ID NO: 1472 - protein, 58 aa, ARTIFICIAL SEQUENCE
  Engineered IL6 binding polypeptide
VDAKYAKEEATAWREIHLLPNLTINQMAAFITKLFDDPSQSSELLSEAKKLNDSQAPK

SEQ ID NO: 1473 - protein, 58 aa, ARTIFICIAL SEQUENCE
  Engineered IL6 binding polypeptide
VDAKYAKEEKRAWYEIHILPNLTVEQVAAFITKLFDDPSQSSELLSEAKKLNDSQAPK

SEQ ID NO: 1474 - protein, 58 aa, ARTIFICIAL SEQUENCE
  Engineered IL6 binding polypeptide
VDAKYAKEEYEAWTEIHLLPNLTVSQMAAFITKLFDDPSQSSELLSEAKKLNDSQAPK

SEQ ID NO: 1475 - protein, 58 aa, ARTIFICIAL SEQUENCE
  Engineered IL6 binding polypeptide
VDAKYAKEESNAWWEIHKLPNLTVNQVAAFITKLFDDPSQSSELLSEAKKLNDSQAPK

SEQ ID NO: 1476 - protein, 58 aa, ARTIFICIAL SEQUENCE
  Engineered IL6 binding polypeptide
VDAKYAKEEKRAWMEIHLLPNLTVDQIAAFITKLFDDPSQSSELLSEAKKLNDSQAPK

SEQ ID NO: 1477 - protein, 58 aa, ARTIFICIAL SEQUENCE
  Engineered IL6 binding polypeptide
VDAKYAKEEKFAWKEIHILPNLTVDQIAAFITKLFDDPSQSSELLSEAKKLNDSQAPK

SEQ ID NO: 1478 - protein, 58 aa, ARTIFICIAL SEQUENCE
  Engineered IL6 binding polypeptide
VDAKYAKEERDAWFEIHVLPNLTILQMAAFITKLFDDPSQSSELLSEAKKLNDSQAPK

SEQ ID NO: 1479 - protein, 58 aa, ARTIFICIAL SEQUENCE
  Engineered IL6 binding polypeptide
VDAKYAKEEHYAWTEIHILPNLTVNQMAAFITKLFDDPSQSSELLSEAKKLNDSQAPK

SEQ ID NO: 1480 - protein, 58 aa, ARTIFICIAL SEQUENCE
  Engineered IL6 binding polypeptide
VDAKYAKEEKRAWMEIHLLPNLTVHQMAAFITKLFDDPSQSSELLSEAKKLNDSQAPK

SEQ ID NO: 1481 - protein, 58 aa, ARTIFICIAL SEQUENCE
  Engineered IL6 binding polypeptide
VDAKYAKEEYDAWVEIHLLPNLTVEQMAAFITKLFDDPSQSSELLSEAKKLNDSQAPK

SEQ ID NO: 1482 - protein, 58 aa, ARTIFICIAL SEQUENCE
  Engineered IL6 binding polypeptide
VDAKYAKEEHTAWFEIHILPNLTISQIAAFITKLFDDPSQSSELLSEAKKLNDSQAPK

SEQ ID NO: 1483 - protein, 58 aa, ARTIFICIAL SEQUENCE
  Engineered IL6 binding polypeptide
VDAKYAKEELQAWKEIHILPNLTVDQIAAFITKLFDDPSQSSELLSEAKKLNDSQAPK

SEQ ID NO: 1484 - protein, 58 aa, ARTIFICIAL SEQUENCE
  Engineered IL6 binding polypeptide
VDAKYAKEEYDAWLEIHLLPNLTISQMAAFITKLFDDPSQSSELLSEAKKLNDSQAPK

SEQ ID NO: 1485 - protein, 58 aa, ARTIFICIAL SEQUENCE
  Engineered IL6 binding polypeptide
VDAKYAKEEARAWREIHILPNLTVEQMAAFITKLFDDPSQSSELLSEAKKLNDSQAPK

SEQ ID NO: 1486 - protein, 58 aa, ARTIFICIAL SEQUENCE
  Engineered IL6 binding polypeptide
VDAKYAKEERNAWFEIHILPNLTIDQMAAFITKLFDDPSQSSELLSEAKKLNDSQAPK

SEQ ID NO: 1487 - protein, 58 aa, ARTIFICIAL SEQUENCE
  Engineered IL6 binding polypeptide
VDAKYAKEEAYAWHEIHVLPNLTIDQMAAFITKLFDDPSQSSELLSEAKKLNDSQAPK

SEQ ID NO: 1488 - protein, 58 aa, ARTIFICIAL SEQUENCE
  Engineered IL6 binding polypeptide
VDAKYAKEEYFAWTEIHKLPNLTINQMAAFITKLFDDPSQSSELLSEAKKLNDSQAPK

SEQ ID NO: 1489 - protein, 58 aa, ARTIFICIAL SEQUENCE
  Engineered IL6 binding polypeptide
VDAKYAKEEAGAWYEIHLLPNLTVEQMAAFITKLFDDPSQSSELLSEAKKLNDSQAPK

SEQ ID NO: 1490 - protein, 58 aa, ARTIFICIAL SEQUENCE
  Engineered IL6 binding polypeptide
VDAKYAKEEKKAWYEIHILPNLTIEQMAAFISKLFDDPSQSSELLSEAKKLNDSQAPK

SEQ ID NO: 1491 - protein, 58 aa, ARTIFICIAL SEQUENCE
  Engineered IL6 binding polypeptide
VDAKYAKEEKQAWFEIHLLPNLTIEQMAAFISKLFDDPSQSSELLSEAKKLNDSQAPK

SEQ ID NO: 1492 - protein, 58 aa, ARTIFICIAL SEQUENCE
  Engineered IL6 binding polypeptide
VDAKYAKEEWHAWLEIHNLPNLTIEQMAAFISKLFDDPSQSSELLSEAKKLNDSQAPK

SEQ ID NO: 1493 - protein, 58 aa, ARTIFICIAL SEQUENCE
  Engineered IL6 binding polypeptide
VDAKYAKEEKSAWIEIHNLPNLTINQMAAFITKLFDDPSQSSELLSEAKKLNDSQAPK

SEQ ID NO: 1494 - protein, 58 aa, ARTIFICIAL SEQUENCE
  Engineered IL6 binding polypeptide
VDAKYAKEEYQAWNEIHILPNLTINQIAAFITKLFDDPSQSSELLSEAKKLNDSQAPK

SEQ ID NO: 1495 - protein, 58 aa, ARTIFICIAL SEQUENCE
  Engineered IL6 binding polypeptide
VDAKYAKEEAYAWVEIHKLPNLTVTQVAAFISKLFDDPSQSSELLSEAKKLNDSQAPK

SEQ ID NO: 1496 - protein, 58 aa, ARTIFICIAL SEQUENCE
  Engineered IL6 binding polypeptide
VDAKYAKEEYDAWMEIHNLPNLTIEQMAAFITKLFDDPSQSSELLSEAKKLNDSQAPK

SEQ ID NO: 1497 - protein, 58 aa, ARTIFICIAL SEQUENCE
  Engineered IL6 binding polypeptide
VDAKYAKEEYEAWVEIHNLPNLTIEQMAAFITKLFDDPSQSSELLSEAKKLNDSQAPK

SEQ ID NO: 1498 - protein, 58 aa, ARTIFICIAL SEQUENCE
  Engineered IL6 binding polypeptide
VDAKYAKEEREAWNEIHLLPNLTIEQIAAFITKLFDDPSQSSELLSEAKKLNDSQAPK

SEQ ID NO: 1499 - protein, 58 aa, ARTIFICIAL SEQUENCE
  Engineered IL6 binding polypeptide
VDAKYAKEEKRAWYEIHILPNLTVGQMAAFISKLFDDPSQSSELLSEAKKLNDSQAPK

SEQ ID NO: 1500 - protein, 58 aa, ARTIFICIAL SEQUENCE
  Engineered IL6 binding polypeptide
VDAKYAKEEKEAWTEIHILPNLTVEQMAAFITKLFDDPSQSSELLSEAKKLNDSQAPK

SEQ ID NO: 1501 - protein, 58 aa, ARTIFICIAL SEQUENCE
  Engineered IL6 binding polypeptide
VDAKYAKEEFEAWFEIHKLPNLTVEQMAAFITKLFDDPSQSSELLSEAKKLNDSQAPK

SEQ ID NO: 1502 - protein, 58 aa, ARTIFICIAL SEQUENCE
  Engineered IL6 binding polypeptide
VDAKYAKEESQAWTEIHLLPNLTIEQMAAFISKLFDDPSQSSELLSEAKKLNDSQAPK

SEQ ID NO: 1503 - protein, 58 aa, ARTIFICIAL SEQUENCE
  Engineered IL6 binding polypeptide
VDAKYAKEERKAWFEIHLLPNLTTQQRSAFISKLFDDPSQSSELLSEAKKLNDSQAPK

SEQ ID NO: 1504 - protein, 58 aa, ARTIFICIAL SEQUENCE
  Engineered IL6 binding polypeptide
VDAKYAKEERSAWFEIHTLPNLTVQQIAAFIWKLYDDPSQSSELLSEAKKLNDSQAPK

SEQ ID NO: 1505 - protein, 58 aa, ARTIFICIAL SEQUENCE
  Engineered IL6 binding polypeptide
VDAKYAKEERQAWWEIHSLPNLTVDQMAAFIVKLMDDPSQSSELLSEAKKLNDSQAPK

SEQ ID NO: 1506 - protein, 58 aa, ARTIFICIAL SEQUENCE
  Engineered IL6 binding polypeptide
VDAKYAKEQAKAWWEIHVLPNLTVHQVAAFITKLFDDPSQSSELLSEAKKLNDSQAPK

SEQ ID NO: 1507 - protein, 58 aa, ARTIFICIAL SEQUENCE
  Engineered IL6 binding polypeptide
VDAKYAKEERDAWHEIQILPNLTITQMAAFISKLFDDPSQSSELLSEAKKLNDSQAPK

SEQ ID NO: 1508 - protein, 58 aa, ARTIFICIAL SEQUENCE
  Engineered IL6 binding polypeptide
VDAKYAKEEQRAWTEIHVLPNLTVQQMAAFITKLFDDPSQSSELLSEAKKLNDSQAPK

SEQ ID NO: 1509 - protein, 58 aa, ARTIFICIAL SEQUENCE
  Engineered IL6 binding polypeptide
VDAKYAKETQHAWWEIHKLPNLTVSQMAAFITKLFDDPSQSSELLSEAKKLNDSQAPK

SEQ ID NO: 1510 - protein, 58 aa, ARTIFICIAL SEQUENCE
  Engineered IL6 binding polypeptide
VDAKYAKEDRTAWWEIHKLPNLTAEQMAAFITKLFDDPSQSSELLSEAKKLNDSQAPK

SEQ ID NO: 1511 - protein, 58 aa, ARTIFICIAL SEQUENCE
  Engineered IL6 binding polypeptide
VDAKYAKEERDAWREIHALPNLTVDQLVAFITKLFDDPSQSSELLSEAKKLNDSQAPK

SEQ ID NO: 1512 - protein, 58 aa, ARTIFICIAL SEQUENCE
  Engineered IL6 binding polypeptide
VDAKYAKEEQRAWREIHLLPNLTIEQMAAFIWKLLDDPSQSSELLSEAKKLNDSQAPK

SEQ ID NO: 1513 - protein, 58 aa, ARTIFICIAL SEQUENCE
  Engineered IL6 binding polypeptide
VDAKYAKEEQRAWTEIHVLPNLTVSQMSAFISKLFDDPSQSSELLSEAKKLNDSQAPK

SEQ ID NO: 1514 - protein, 58 aa, ARTIFICIAL SEQUENCE
  Engineered IL6 binding polypeptide
VDAKYAKEQHQAWNEIHLLPNLTVNQMAAFIVKLFDDPSQSSELLSEAKKLNDSQAPK

SEQ ID NO: 1515 - protein, 58 aa, ARTIFICIAL SEQUENCE
  Engineered IL6 binding polypeptide
VDAKYAKEEHAAWLEIHLLPNLTVKQMAAFIGKLMDDPSQSSELLSEAKKLNDSQAPK

SEQ ID NO: 1516 - protein, 58 aa, ARTIFICIAL SEQUENCE
  Engineered IL6 binding polypeptide
VDAKYAKEEQMAWFEIHLLPNLTVGQMAAFIQKLFDDPSQSSELLSEAKKLNDSQAPK

SEQ ID NO: 1517 - protein, 58 aa, ARTIFICIAL SEQUENCE
  Engineered IL6 binding polypeptide
VDAKYAKEERSAWFEIHILPNLTISQKSAFIVKLFDDPSQSSELLSEAKKLNDSQAPK

SEQ ID NO: 1518 - protein, 58 aa, ARTIFICIAL SEQUENCE
  Engineered IL6 binding polypeptide
VDAKYAKEERSAWYEIHLLPNLTADQMAAFIAKLFDDPSQSSELLSEAKKLNDSQAPK

SEQ ID NO: 1519 - protein, 58 aa, ARTIFICIAL SEQUENCE
  Engineered IL6 binding polypeptide
VDAKYAKEEQRAWYEIHLLPNLTIEQLTAFIMKLMDDPSQSSELLSEAKKLNDSQAPK

SEQ ID NO: 1520 - protein, 58 aa, ARTIFICIAL SEQUENCE
  Engineered IL6 binding polypeptide
VDAKYAKEERQAWWEITILPNLTIEQVAAFITKLFDDPSQSSELLSEAKKLNDSQAPK

SEQ ID NO: 1521 - protein, 58 aa, ARTIFICIAL SEQUENCE
  Engineered IL6 binding polypeptide
VDAKYAKEDYEAWVEIHVLPNLTVEQKAAFIVKLFDDPSQSSELLSEAKKLNDSQAPK

SEQ ID NO: 1522 - protein, 58 aa, ARTIFICIAL SEQUENCE
  Engineered IL6 binding polypeptide
VDAKYAKEVYNAWHEIHVLPNLTTLQISAFISKLFDDPSQSSELLSEAKKLNDSQAPK

SEQ ID NO: 1523 - protein, 58 aa, ARTIFICIAL SEQUENCE
  Engineered IL6 binding polypeptide
VDAKYAKEERKAWWEIHLLPNLTVRQTAAFIWKLLDDPSQSSELLSEAKKLNDSQAPK

SEQ ID NO: 1524 - protein, 58 aa, ARTIFICIAL SEQUENCE
  Engineered IL6 binding polypeptide
VDAKYAKEEQAAWWEIHMLPNLTIEQRTAFIIKLFDDPSQSSELLSEAKKLNDSQAPK

SEQ ID NO: 1525 - protein, 58 aa, ARTIFICIAL SEQUENCE
  Engineered IL6 binding polypeptide
VDAKYAKEEQTAWFEIHILPNLTVNQRVAFITKLFDDPSQSSELLSEAKKLNDSQAPK

SEQ ID NO: 1526 - protein, 58 aa, ARTIFICIAL SEQUENCE
  Engineered IL6 binding polypeptide
VDAKYAKEEALAWREIHLLPNLTTVQISAFIAKLLDDPSQSSELLSEAKKLNDSQAPK

SEQ ID NO: 1527 - protein, 58 aa, ARTIFICIAL SEQUENCE
  Engineered IL6 binding polypeptide
VDAKYAKEEKFAWTEIHLLPNLTIGQQAAFIWKLFDDPSQSSELLSEAKKLNDSQAPK

SEQ ID NO: 1528 - protein, 58 aa, ARTIFICIAL SEQUENCE
  Engineered IL6 binding polypeptide
VDAKYAKEERAAWWEIHVLPNLTVSQMYAFITKLFDDPSQSSELLSEAKKLNDSQAPK

SEQ ID NO: 1529 - protein, 58 aa, ARTIFICIAL SEQUENCE
  Engineered IL6 binding polypeptide
VDAKYAKEEQRAWYEIHLLPNLTVRQRGAFITKLFDDPSQSSELLSEAKKLNDSQAPK

SEQ ID NO: 1530 - protein, 58 aa, ARTIFICIAL SEQUENCE
  Engineered IL6 binding polypeptide
VDAKYAKEHRQAWMEIHLLPNLTIRQIAAFIAKLFDDPSQSSELLSEAKKLNDSQAPK

SEQ ID NO: 1531 - protein, 58 aa, ARTIFICIAL SEQUENCE
  Engineered IL6 binding polypeptide
VDAKYAKEEKVAWHEIHVLPNLTVSQISAFITKLFDDPSQSSELLSEAKKLNDSQAPK

SEQ ID NO: 1532 - protein, 58 aa, ARTIFICIAL SEQUENCE
  Engineered IL6 binding polypeptide
VDAKYAKEEKHAWYEIHLLPNLTISQLSAFIMKLFDDPSQSSELLSEAKKLNDSQAPK

SEQ ID NO: 1533 - protein, 58 aa, ARTIFICIAL SEQUENCE
  Engineered IL6 binding polypeptide
VDAKYAKESAFAWWEIHLLPNLTVEQIAAFIWKLLDDPSQSSELLSEAKKLNDSQAPK

SEQ ID NO: 1534 - protein, 58 aa, ARTIFICIAL SEQUENCE
  Engineered IL6 binding polypeptide
VDAKYAKEEQVAWREIHVLPNLTVEQVKAFINKLFDDPSQSSELLSEAKKLNDSQAPK

SEQ ID NO: 1535 - protein, 58 aa, ARTIFICIAL SEQUENCE
  Engineered IL6 binding polypeptide
VDAKYAKEEMDAWTEIHILPNLTVEQMEAFIVKLFDDPSQSSELLSEAKKLNDSQAPK

SEQ ID NO: 1536 - protein, 58 aa, ARTIFICIAL SEQUENCE
  Engineered IL6 binding polypeptide
VDAKYAKEEGRAWYEIHALPNLTVEQMSAFIIKLFDDPSQSSELLSEAKKLNDSQAPK

SEQ ID NO: 1537 - protein, 58 aa, ARTIFICIAL SEQUENCE
  Engineered IL6 binding polypeptide
VDAKYAKEERNAWFEIHILPNLTLSQITAFIWKLLDDPSQSSELLSEAKKLNDSQAPK

SEQ ID NO: 1538 - protein, 58 aa, ARTIFICIAL SEQUENCE
  Engineered IL6 binding polypeptide
VDAKYAKEEHNAWTEIHRLPNLTVKQTSAFIEKLFDDPSQSSELLSEAKKLNDSQAPK

SEQ ID NO: 1539 - protein, 58 aa, ARTIFICIAL SEQUENCE
  Engineered IL6 binding polypeptide
VDAKYAKEEFKAWWEIHVLPNLTADQVAAFIVKLFDDPSQSSELLSEAKKLNDSQAPK

SEQ ID NO: 1540 - protein, 58 aa, ARTIFICIAL SEQUENCE
  Engineered IL6 binding polypeptide
VDAKYAKEQHMAWTEIHLLPNLTVAQMAAFIVKLFDDPSQSSELLSEAKKLNDSQAPK

SEQ ID NO: 1541 - protein, 58 aa, ARTIFICIAL SEQUENCE
  Engineered IL6 binding polypeptide
VDAKYAKEEQRAWWEIHLLPNLTARQTAAFIWKLMDDPSQSSELLSEAKKLNDSQAPK

SEQ ID NO: 1542 - protein, 58 aa, ARTIFICIAL SEQUENCE
  Engineered IL6 binding polypeptide
VDAKYAKEQKSAWTEIHLLPNLTVHQISAFIAKLLDDPSQSSELLSEAKKLNDSQAPK

SEQ ID NO: 1543 - protein, 58 aa, ARTIFICIAL SEQUENCE
  Engineered IL6 binding polypeptide
VDAKYAKEEHLAWKEIHKLPNLTVIQMAAFITKLFDDPSQSSELLSEAKKLNDSQAPK

SEQ ID NO: 1544 - protein, 58 aa, ARTIFICIAL SEQUENCE
  Engineered IL6 binding polypeptide
VDAKYAKEERAAWWEIHMLPNLTADQMAAFIAKLFDDPSQSSELLSEAKKLNDSQAPK

SEQ ID NO: 1545 - protein, 58 aa, ARTIFICIAL SEQUENCE
  Engineered IL6 binding polypeptide
VDAKYAKEQRTAWWEIHILPNLTVKQLVAFINKLFDDPSQSSELLSEAKKLNDSQAPK

SEQ ID NO: 1546 - protein, 58 aa, ARTIFICIAL SEQUENCE
  Engineered IL6 binding polypeptide
VDAKYAKEEQIAWFEIHLLPNLTVGQRTAFIVKLFDDPSQSSELLSEAKKLNDSQAPK

SEQ ID NO: 1547 - protein, 58 aa, ARTIFICIAL SEQUENCE
  Engineered IL6 binding polypeptide
VDAKYAKEERRAWFEISVLPNLTVDQTAAFIMKLFDDPSQSSELLSEAKKLNDSQAPK

SEQ ID NO: 1548 - protein, 58 aa, ARTIFICIAL SEQUENCE
  Engineered IL6 binding polypeptide
VDAKYAKEEADAWMEIHILPNLTVLQRSAFIIKLFDDPSQSSELLSEAKKLNDSQAPK

SEQ ID NO: 1549 - protein, 58 aa, ARTIFICIAL SEQUENCE
  Engineered IL6 binding polypeptide
VDAKYAKEEREAWFEIHVLPNLTIKQISAFIHKLFDDPSQSSELLSEAKKLNDSQAPK

SEQ ID NO: 1550 - protein, 58 aa, ARTIFICIAL SEQUENCE
  Engineered IL6 binding polypeptide
VDAKYAKEERRAWFEIHTLPNLTVEQIEAFINKLFDDPSQSSELLSEAKKLNDSQAPK

SEQ ID NO: 1551 - protein, 58 aa, ARTIFICIAL SEQUENCE
  Engineered IL6 binding polypeptide
VDAKYAKEERAAWWEIHGLPNLTVWQTAAFIVKLFDDPSQSSELLSEAKKLNDSQAPK

SEQ ID NO: 1552 - protein, 58 aa, ARTIFICIAL SEQUENCE
  Engineered Z variant
AEAKYAKELGWATWEIFNLPNLTGVQVKAFIDKLRDDPSQSSELLSEAKKLNDSQAPK

SEQ ID NO: 1553 - protein, 58 aa, ARTIFICIAL SEQUENCE
  Engineered Z variant
VDAKYAKELGWATWEIFNLPNLTGVQVKAFIDKLRDDPSQSSELLSEAKKLNDSQAPK

SEQ ID NO: 1554 - protein, 46 aa, ARTIFICIAL SEQUENCE
  Engineered albumin binding polypeptide
LAEAKEAANAELDSYGVSDFYKRLIDKAKTVEGVEALKDAILAALP

SEQ ID NO: 1555 - protein, 184 aa, HOMO SAPIENS
PVPPGEDSKDVAAPHRQPLTSSERIDKQIRYILDGISALRKETCNKSNMCESSKEALAENNLNLPKMAEKDGCFQSGFNEETCLVKIITGLLEFEVYLEYLQNRFESSEEQARAVQMSTKVLIQFLQKKAKNLDAITTPDPTTNASLLTKLQAQNQWLQDMTTHLILRSFKEFLQSSLRALRQM

SEQ ID NO: 1556 - protein, 188 aa, MUS MUSCULUS
MFPTSQVRRGDFTEDTTPNRPVYTTSQVGGLITHVLWEIVEMRKELCNGNSDCMNNDDALAENNLKLPEIQRNDGCYQTGYNQEICLLKISSGLLEYHSYLEYMKNNLKDNKKDKARVLQRDTETLIHIFNQEVKDLHKIVLPTPISNALLTDKLESQKEWLRTKTIQFILKSLEEFLKVTLRSTRQT

SEQ ID NO: 1557 - DNA, 24 bp, ARTIFICIAL SEQUENCE
  PCR primer
tgcttccggctcgtatgttgtgtg

SEQ ID NO: 1558 - DNA, 21 bp, ARTIFICIAL SEQUENCE
  PCR primer
cggaaccagagccaccaccgg

SEQ ID NO: 1559 - DNA, 21 bp, ARTIFICIAL SEQUENCE
  Sequencing primer
cggaaccagagccaccaccgg

SEQ ID NO: 1560 - DNA, 147 bp, ARTIFICIAL SEQUENCE
  Library oligonucleotide
  misc_feature (39)..(47): n is a, c, g, or t
  misc_feature (54)..(56): n is a, c, g, or t
  misc_feature (63)..(68): n is a, c, g, or t
  misc_feature (84)..(89): n is a, c, g, or t
  misc_feature (93)..(98): n is a, c, g, or t
  misc_feature (108)..(110): n is a, c, g, or t
  misc_feature (117)..(119): n is a, c, g, or t
aaataaatctcgaggtagatgccaaatacgccaaagaannnnnnnnngcgtggnnngagatcnnnnnnctgcctaacctcaccnnnnnncaannnnnngccttcatcnnnaaattannngatgacccaagccagagctcattattta

SEQ ID NO: 1561 - DNA, 147 bp, ARTIFICIAL SEQUENCE
  Library oligonucleotide
  misc_feature (39)..(47): n is a, c, g, or t
  misc_feature (51)..(56): n is a, c, g, or t
  misc_feature (63)..(68): n is a, c, g, or t
  misc_feature (84)..(89): n is a, c, g, or t
  misc_feature (93)..(98): n is a, c, g, or t
  misc_feature (108)..(110): n is a, c, g, or t
  misc_feature (117)..(119): n is a, c, g, or t
aaataaatctcgaggtagatgccaaatacgccaaagaannnnnnnnngctnnnnnngagatcnnnnnnctgccgaacctgaccnnnnnncagnnnnnngccttcatcnnnaaattannngatgacccaagccagagctcattattta

1. An interleukin-6 (IL-6) binding polypeptide, comprising an IL-6 binding motif (BM), which motif consists of an amino acid sequence selected from:
i)
EEX₃X₄AWX₇EIHX₁₁LPNLX₁₆X₁₇X₁₈QX₂₀X₂₁AFIX₂₅X₂₆LX₂₈X₂₉
wherein, independently from each other,
X₃ is selected from A, F, H, K, Q, R, S, W and Y;
X₄ is selected from A, D, E, F, H, I, K, L, M, N, Q, R, S, T, V and Y;
X₇ is selected from F, H, I, K, L, M, N, R, S, T, V, W and Y;
X₁₁ is selected from A, I, K, L, M, N, R, S, T and V;
X₁₆ is selected from N and T;
X₁₇ is selected from A, I, T and V;
X₁₈ is selected from D, E, G, H, K, N, Q, R, S and T;
X₂₀ is selected from I, L, M, R, T and V;
X₂₁ is selected from A, S, T and V;
X₂₅ is selected from I, M, Q, S, T, V and W;
X₂₆ is selected from K and S;
X₂₈ is selected from F, L, M and Y; and
X₂₉ is selected from D and R; and
ii) an amino acid sequence which has at least 93% identity to the sequence defined in i).

2. The IL-6 binding polypeptide according to claim 1, wherein sequence i) corresponds to the sequence from position 8 to position 36 in a sequence selected from the group consisting of SEQ ID NO:1-1551.

3. The IL-6 binding polypeptide according to claim 1, wherein said IL-6 binding motif forms part of a three-helix bundle protein domain.

4. The IL-6 binding polypeptide according to claim 1, which comprises a binding module BMod, the amino acid sequence of which is selected from:
iii)
K-[BM]-DPSQSXₐX_{b}LLX_{c}EAKKLX_{d}XₑX_{f}Q;
wherein
[BM] is an IL-6 binding motif as defined in claim 1 provided that X₂₉ is D;
Xₐ is selected from A and S;
X_{b} is selected from N and E;
X_{c} is selected from A, S and C;
X_{d} is selected from E, N and S;
Xₑ is selected from D, E and S;
X_{f} is selected from A and S; and
iv) an amino acid sequence which has at least 91% identity to a sequence defined by iii).

5. The IL-6 binding polypeptide according to claim 1, which comprises an amino acid sequence selected from:
xi)
VDAKYAK-[BM]-DPSQSSELLSEAKKLNDSQAPK;
wherein [BM] is an IL-6 binding motif as defined in claim 1; and
xii) an amino acid sequence which has at least 89% identity to the sequence defined in xi).

6. The IL-6 binding polypeptide according to claim 5, wherein sequence xi) is selected from the group consisting of SEQ ID NO:1-1551.

7. The IL-6 binding polypeptide according to claim 1, which is capable of blocking the IL-6 dependent signaling via the cis-signaling pathway and/or the trans-signaling pathway.

8. The IL-6 binding polypeptide according to claim 7, wherein the half maximal inhibitory concentration of the blocking is at most 1×10⁻⁶ M.

9. The IL-6 binding polypeptide according to claim 7, which is capable of blocking the interaction of IL-6/IL-6Rα with gp130.

10. The IL-6 binding polypeptide according to claim 1, which is capable of binding to IL-6 such that the EC50 value of the interaction is at most 1×10⁻⁷ M or such that the K_{D} value of the interaction is at most 1×10⁻⁸ M.

11. A fusion protein or conjugate comprising
a first moiety consisting of the IL-6 binding polypeptide according to claim 1; and
a second moiety consisting of a polypeptide having a desired biological activity.

12. A polynucleotide encoding the IL-6 binding polypeptide according to claim 1.

13. A composition comprising the IL-6 binding polypeptide according to claim 1 and at least one pharmaceutically acceptable excipient or carrier.

14. A method of detecting IL-6, comprising
contacting a sample suspected to contain IL-6 with the IL-6 binding polypeptide according to claim 1, and
detecting the binding of the IL-6 binding polypeptide to IL-6 to indicate the presence of IL-6 in the sample.

15. The IL-6 binding polypeptide according to claim 1, wherein said IL-6 binding polypeptide modulates IL-6 function in vivo.

16. A method of treatment of an IL-6 related disorder, comprising administering the IL-6 binding polypeptide according to claim 1 to a subject in need of treatment of an IL-6 related disorder.

17. The method according to claim 16, wherein said IL-6 related disorder is selected from the group consisting of inflammatory diseases, autoimmune diseases, infectious disease, cancer, diabetes, neurological disease and depression.

18. The method of claim 16, wherein the IL-6 related disorder is selected from the group consisting of rheumatoid arthritis, juvenile rheumatoid arthritis, juvenile idiopathic arthritis or systemic juvenile idiopathic arthritis, vasculitis, psoriatic arthritis, psoriasis, ankylosing spondylitis, a chronic inflammatory bowel disease, Crohn's disease, ulcerative colitis; Grave's disease, Behcet's disease, uveitis, giant cell arteritis, multiple sclerosis, systemic sclerosis, systemic lupus erythematosus, polymyositis, polymyalgia rheumatic, asthma, chronic obstructive pulmonary disease, relapsing polychondritis, pancreatitis, peritonitis, nephritis, Kawasaki's disease, Sjögren's syndrome, adult Still's disease, Alzheimer's disease, HIV, diabetes, sepsis, cachexia, myelodysplastic syndrome (MDS), liver cirrhosis, graft versus host disease, myocardial infarction, endometriosis, and osteoporosis; and
wherein the cancer is selected from the group consisting of colitis associated cancer, renal cancer, kidney cancer, prostate cancer, malignant lymphoma, multiple myeloma, Castleman's disease, breast cancer and lung cancer.

19. The IL-6 binding polypeptide according to claim 2, wherein sequence i) is the sequence from position 8 to position 36 in a sequence selected from the group consisting of SEQ ID NO:1-14 and SEQ ID NO:1512.

20. The complex according to claim 19, wherein sequence i) is the sequence from position 8 to position 36 in SEQ ID NO:1512.
